(19) United States
(12) Patent Application Publication
(10) Pub. No.: US 2002/0160934 A1
(43) Pub. Date: Oct. 31, 2002

(54) Nucleic acid sequences from Drosophila melanogaster that encode proteins essential for larval viability and uses thereof

(76) Inventors: Julie Broadus, Chapel Hill, NC (US); Lynn Stam, Raleigh, NC (US); Jane S. Bachmann, Durham, NC (US); Kim P. Kamdar, San Diego, CA (US)

Correspondence Address: SYNGENTA BIOTECHNOLOGY, INC., PATENT DEPARTMENT, 3054 CORNWALLIS ROAD, P.O. BOX 12257, RESEARCH TRIANGLE PARK, NC, 27709-2257, US

(21) Appl. No.: 10/108,605

(22) Filed: Mar. 27, 2002

Related U.S. Application Data
(63) Continuation of application No. 09/761,142, filed on Jan. 16, 2001.
(60) Provisional application No. 60/176,418, filed on Jan. 14, 2000.

(51) Int. Cl. A01N 61/00

(52) U.S. Cl. 514/1; 800/3

(57) ABSTRACT

Nucleotide sequences are isolated from Drosophila melanogaster that code for proteins essential for larval viability. These proteins are useful for discovering new insecticides based on the essentiality of the nucleotide sequences for Drosophila larval viability. Further provided are recombinant proteins and methods for identifying inhibitors to these proteins. Protein inhibitors active in the methods disclosed herein are useful as insecticidal, ectoparasiticidal, antiparasitic, anthementhic and acaracidal agents.

[0001] This application is a continuation of U.S. application Ser. No. 09/761,142, filed Jan. 16, 2001, which itself claims the benefit of U.S. Provisional Application No. 60/176,418, filed Jan. 14, 2000, which is hereby incorporated by reference in its entirety.

[0002] The Sequence Listing associated with the instant disclosure has been submitted as a 1.37 megabyte file on CD-R (in duplicate) instead of on paper. Each CD-R is marked in indelible ink to identify the Applicants, Title, File Name (31133B.ST25.txt), Creation Date (Mar. 25, 2002), Computer System (IBM-PC/MS-DOS/MS-Windows), and Docket No. (31133B). The Sequence Listing submitted on CD-R is hereby incorporated by reference into the instant disclosure.

### FIELD OF INVENTION

[0003] The present invention pertains to nucleic acid sequences isolated from Drosophila melanogaster that encode proteins essential for larval viability. The invention particularly relates to methods of using these proteins as insecticide targets, based on this essentiality.

### BACKGROUND OF THE INVENTION

[0004] Insects contribute or cause many human and animal diseases, and are responsible for substantial agricultural and property damage. The societal costs associated with insect pests in dollars, time and suffering are monumental. The total worldwide market size for insecticide crop protection is over $5 billion. To combat these problems, insecticidal compounds have been developed and employed.

[0005] The idea to use chemicals for insect control is not new. The scientific use of pesticides started with the introduction of arsenical insecticides and organic compounds such as tar, petroleum oils, and dinitrophenol emulsions at the end of the last century. But, the systematic search for synthetic organic insecticides was only launched after the discovery of the insecticidal properties of DDT in 1939. After World War II, chemical research concentrated mainly on chlorinated hydrocarbons and cyclodienes, which all require high rates of application and have a rather broad spectrum of activity. Most of them are persistent in the environment and may pose a significant risk for accumulation in the food chain. Today the use of these chemicals is very much restricted.

[0006] From this point, the major emphasis in research has been given to organophosphates and carbamates, which are readily degradable in the environment with little tendency for bioaccumulation. The toxicity of these compounds varies within a broad range from medium to highly toxic. Organophosphates and carbamates are still widely use, although the more toxic ones are banned in certain countries. The formamidines have as their major advantage a different mode of action and their selectivity, which made them suitable for use in IPM (insect pest management) programs. They are easily degradable with no accumulation potential, but for toxicological reasons some have had to be withdrawn from the market.

[0007] For the past decade, insecticide research has concentrated on leadfinding for new chemical structures interfering with new target mechanisms. The chances for success are rather remote, because the hurdles for the registration of a new insecticide are set very high. Toxicological aspects, insecticide resistance, environmental behavior, and IPM fitness are some of the critical factors that have to be considered together with economical factors.

[0008] Novel insecticides can now be discovered using high-throughput screens that implement recombinant DNA technology. Proteins found to be essential to insect viability can be recombinantly produced through standard molecular biological techniques and utilized as insecticide targets in screens for novel inhibitors of the enzymes' activity. The novel inhibitors discovered through such screens may then be used as insecticides to control undesirable insect infestation.

[0009] However, as the world population continues to grow, there will be increasing food shortages. Therefore, there exists continuing need to find new, effective and economic insecticides.

### SUMMARY OF THE INVENTION

[0010] In view of these needs, it is one object of the invention to provide essential genes in insects such as Drosophila melanogaster. It is another object to provide the essential proteins encoded by these essential genes for assay development to identify inhibitory compounds with insecticidal activity. It is still another object of the present invention to provide an effective and beneficial method for identifying new or improved insecticides using the essential proteins of the invention.

[0011] In furtherance of these and other objects, the present invention provides DNA molecules comprising nucleotide sequences isolated from Drosophila melanogaster that encode proteins essential for larval viability. The inventors are the first to demonstrate that the nucleotide sequences of the invention are essential for larval viability. This knowledge is exploited to provide novel insecticide modes of action. One advantage of the present invention is that the proteins encoded by the essential nucleotide sequences provide the bases for assays designed to easily and rapidly identify novel insecticides.

[0012] Disruption of the nucleotide sequences of the invention demonstrates that the activity of each corresponding encoded protein is essential for Drosophila larval viability. Genetic results show that when each nucleotide sequence of the invention is mutated in Drosophila, the resulting phenotype is larval lethal in the homozygous state. This demonstrates a critical role for the protein encoded by the mutated nucleotide sequence. This further implies that chemicals that inhibit the expression of the protein when in contact with insects are likely to have detrimental effects on insects and are potentially good insecticide candidates. The present invention therefore provides methods of using the disclosed nucleotide sequences or proteins encoded thereby to identify inhibitors thereof. The inhibitors can then be used as insecticides to kill undesirable insect populations where crops are grown, particularly agronomically important crops such as maize, and other cereal crops such as wheat, oats, rye, sorgum, rice, barley, millet, turf and forage grasses and the like, as well as cotton, sugar cane, sugar beet, oilseed rape, soybeans, vegetable crops and fruits.

[0013] The present invention accordingly provides cDNA sequences derived from Drosophila melanogaster. In one embodiment, the present invention provides an isolated DNA molecule comprising a nucleotide sequence selected from the group consisting of the even numbered SEQ ID NOs: 14-360. In another embodiment, the present invention provides an isolated DNA molecule comprising a nucleotide sequence that encodes a protein selected from the group consisting of the odd numbered SEQ ID NOs:15-361.

[0014] The present invention also provides a chimeric construct comprising a promoter operatively linked to a DNA molecule according to the present invention, wherein the promoter is preferably functional in a eukaryote, wherein the promoter is preferably heterologous to the DNA molecule. The present invention further provides a recombinant vector comprising a chimeric construct according to the present invention, wherein said vector is capable of being stably transformed into a host cell. The present invention still further provides a host cell comprising a DNA molecule according to the present invention, wherein said DNA molecule is preferably expressible in the cell. The host cell is preferably selected from the group consisting of an insect cell, a yeast cell, and a prokaryotic cell.

[0015] The present invention also provides proteins essential for Drosophila melanogaster larval viability. In one embodiment, the present invention provides an isolated protein comprising an amino acid sequence selected from the group consisting of the odd numbered SEQ ID NOs:15-361. In accordance with another embodiment, the present invention also relates to the recombinant production of proteins of the invention and methods of using the proteins of the invention in assays for identifying compounds that interact with the protein.

[0016] In another preferred embodiment, the present invention describes a method for identifying chemicals having the ability to inhibit the activity of the disclosed proteins. In a preferred embodiment, the present invention provides a method for selecting compounds that interact with a protein of the invention, comprising: (a) expressing a DNA molecule according to the present invention to generate the corresponding protein of the invention, (b) testing a compound suspected of having the ability to interact with the protein expressed in step (a), and (c) selecting compounds that interact with the protein in step (b).

[0017] Other objects and advantages of the present invention will become apparent to those skilled in the art and from a study of the following description of the invention and non-limiting examples. The entire contents of all publications mentioned herein are hereby incorporated by reference.

### BRIEF DESCRIPTION OF THE SEQUENCES IN THE SEQUENCE LISTING

[0018] SEQ ID NOs:1-13 are PCR primers.

[0019] Even numbered SEQ ID NOs:14-360 are nucleotide sequences described in the table below.

[0020] Odd numbered SEQ ID NOs:15-361 are protein sequences encoded by the immediately preceding nucleotide sequence, e.g., SEQ ID NO:15 is the protein encoded by the nucleotide of SEQ ID NO:14, SEQ ID NO:17 is the protein encoded by the nucleotide sequence of NO:16, etc.

| SEQ ID | | | |
|---|---|---|---|
| NO: | CT | Gene Name | BLAST |
| 14 | CT7922 | late bloomer (lbl) | H. sapiens 4507541 9.e−05 48.4 gi\|4507541\|ref\|NP_003261.1∥ |
| | | | transmembrane 4 superfamily member 6 >gi\|2829196 |
| | | | (AF043906) T245 protein |
| 16 | | | |
| 18 | CT23784 | CG7840 | C. elegans 3873678 7.e−35 148 gi\|3873678\|emb\|CAA94885.1\| |
| | | | (Z71178) Similarity with yeast hypothetical protein (Swiss |
| | | | prot accession |
| 20 | | | |
| 22 | CT23155 | | |
| 24 | CT1431 | CG1070 | C. elegans 465904 5.e−16 87.8 |
| | | | gi\|465904\|sp\|P34447\|YMA2_CAEEL HYPOTHETICAL |
| | | | 56.5 KD PROTEIN F54F2.2 IN CHROMOSOME III |
| | | | >gi\|630637\|pir |
| 26 | CT13858 | twinstar (tsr) | C. elegans 4262577 4.e−20 175.6 gi\|4262577\|gb\|AAD14704\| |
| | | | (AF125953) contains similarity to C. elegans actin |
| | | | depolymerizing factor UNC |
| 28 | CT12433 | | |
| 30 | CT41667 | ornithine decarboxylase | |
| | | antizyme | |
| 32 | CT41667 | GUTFEELING | 2.e−12 74.5 gi\|1709427\|sp\|P54368\|OAZ_HUMAN |
| | | PROTEIN | ORNITHINE DECARBOXYLASE ANTIZYME (ODC-AZ) |
| | | | >gi\|2576244\|dbj\|BAA23101\|( |
| 34 | CT24701 | small nuclear | H. sapiens 4759160 2.e−37 156 gi\|4759160\|ref\|NP_004166.1∥ |
| | | ribonucleoprotein Sm | small nuclear ribonucleoprotein D3 polypeptide (18kD) |
| | | D3 (from EST) | >gi\|1173456\|sp\|P4 |
| 36 | CT3681 | Deadpan Protein | 122214 2.e−38 161 gi\|122214\|sp\|P29303\|HAIR_DROVI |
| | | | HAIRY PROTEIN >gi\|157590 (M87885) basic-helix-loop- |
| | | | helix protein [Drosophila virilis |
| 38 | | Hsp70/Hsp90 | |
| | | organizing protein | |
| | | homolog | |
| 40 | CT13570 | DnaJ60 | 6323870 4.e−08 59.3 gi\|6323870\|ref\|NP_013941.1\|SCJ1\|dnaJ |
| | | | homolog; Scj1p >gi\|134297\|sp\|P25303\|SCJ1_YEAST SCJ1 |
| | | | PROTEIN >g |
| 42 | | | |
| 44 | CT20524 | rab-protein 6 | H. sapiens 4506373 2.e−99 363 gi\|4506373\|ref\|NP_002860.1∥ |
| | | | RAB6, member RAS oncogene family |
| | | | >gi\|131796\|sp\|P20340\|RAB6_HUMAN RAS-RE |
| 46 | CT29466 | CG10496 | |
| 48 | CT20712 | Klingon | 7.e−13 196.7 gi\|1017427\|emb\|CAA62189\|(X90569) elastic |
| | | | titin [Homo sapiens] |
| 50 | CT21638 | protein disulfide | 687235 1.e−144 578.2 gi\|687235 (U12440) protein disulfide |
| | | isomerase | isomerase [Onchocerca volvulus] |
| 52 | CT3604 | ferritin subunit | 2e−11 120532 P19976 FRI_SOYBN FERRITIN |
| | | | PRECURSOR (SOF-35) >gi\|81773\|pir∥A40992 ferritin |
| | | | precursor - |
| 54 | | RM62 mRNA for novel | |
| | | RNA helicase | |
| 56 | CT3224 | string, CDC25 involved | 266557 5.e−52 207 gi\|266557\|sp\|P30309\|MPI1_XENLA M- |
| | | in cell cycle control | PHASE INDUCER PHOSPHATASE 1/B |
| | | | >gi\|419980\|pir∥A42679 protein-tyrosi |
| 58 | CT23521 | | |
| 60 | CT5673 | tramtrack p69 | H. sapiens 4650844 9.e−08 60.5 gi\|4650844\|dbj\|BAA77027.1\| |
| | | | (AB026190) Kelch motif containing protein [Homo sapiens] |
| 62 | GM03018 | | |
| 64 | CT2210 | UDP-Glucose 4- | H. sapiens 4503891 1.e−125 448 gi\|4503891\|ref\|NP_000394.1∥ |
| | | Epimerase | galactose-4-epimerase, UDP- |
| | | | >gi\|2494659\|sp\|Q14376\|GALE_HUMAN UDP-GLUCOS |
| 66 | | | |
| 68 | | ferritin subunit 1 (Fer1) | |
| 70 | CT38280 | SNF4/AMP-activated | |
| | | protein kinase gamma | |
| | | subunit | |
| 72 | CT27760 | CG9829 | |
| 74 | CT13958 | heat shock protein | Remainders 662802 0 1114 gi\|662802 (U20256) heat shock- |
| | | cognate 70 (Hsc4) | like protein, similar to heat shock 70 kDa proteins [Ceratitis |
| | | | capitat |
| 76 | | probable transcriptional | |
| | | regulator dre4 | |
| 78 | CT23870 | punt receptor | 4406075 1.e−123 444 gi\|4406075\|gb\|AAD19844\|(AF069500) |
| | | serine/threonine kinase | activin receptor IIB [Danio rerio] |
| 80 | | histone 4 replacement | |
| | | gene | |
| 82 | CT32834 | CG17173 | H. sapiens 5748487 4.e−57 222 gi\|5748487\|dbj\|BAA83464.1\| |
| | | | (AB000624) UDP-N-acetylglucosamine: alpha-1,3-D- |
| | | | mannoside beta-1,4-N-acet |
| 84 | CT7286 | abnormal wing disc | 2827444 2.e−65 249 gi\|2827444 (AF043542) nucleoside |
| | | | diphosphate kinase [Gallus gallus] |
| 86 | CT7116 | CG2922 | H. sapiens 286001 i.e−121 436 gi\|286001\|dbj\|BAA02795\| |
| | | | (D13630) KIAA0005 [Homo sapiens] |
| 88 | CT16413 | head involution | D. melanogaster 2498442 1.e−146 521 |
| | | defective protein (hid) | gi\|2498442\|sp\|Q24106\|HID_DROME HEAD INVOLUTION |
| | | | DEFECTIVE PROTEIN (WRINKLED PROTEIN) |
| 90 | CT20570 | adenylate kinase (ATP- | 6707707 2.e−58 226 gi\|6707707\|sp\|Q9WTP7\|KAD3_MOUSE |
| | | AMP | GTP:AMP PHOSPHOTRANSFERASE MITOCHONDRIAL |
| | | Transphosphorylase) | (AK3) >gi\|4760600\|dbj\|BAA77 |
| 92 | CT38193 | Drosophila | H. sapiens 4506119 8.e−53 265.4 |
| | | melanogaster prospero | gi\|4506119\|ref\|NP_002754.1∥prospero-related homeobox 1 |
| | | gene | >gi\|3024449\|sp\|Q92786\|PRX1_HUMAN HOMEOBOX P |
| 94 | CT13750 | nonstop, not | |
| 96 | CT38193 | | |
| 98 | CT33205 | serine/threonine protein | |
| | | kinase | |
| 100 | | | |
| 102 | | Drosophila | |
| | | melanogaster laminin | |
| | | A chain gene | |
| 104 | CT36397 | Drosophila | 5730154 0 732 gi\|5730154\|emb\|CAB52475.1\|(AJ245748) |
| | | melanogaster fatty acid | fatty acid desaturase [Drosophila simulans] |
| | | desaturase | |
| 106 | CT9405 | | 4.e−30 130 gi\|6691812\|emb\|CAB65846.1\|(AL133506) |
| | | | /prediction=(method: ““genscan””, version: ““1.0””, |
| | | | score:““109. |
| 108 | CT15810 | CG4919 | H. sapiens 4504011 3.e−19 97.1 gi\|4504011\|ref\|NP_002052.1∥ |
| | | | glutamate-cysteine ligase regulatory protein; gamma- |
| | | | glutamylcysteine sy |
| 110 | | | |
| 112 | | D.melanogaster E2F | |
| 114 | CT39616 | cytochrome p450 | 0.69 AB018267 g3882168 Human mRNA for KIAA0724 |
| | | monooxygenase | protein, complete cds. 0 |
| | | (Cyp6a8) | |
| 116 | CT1010 | Extra-Macrochaetae | |
| | | Protein | |
| 118 | | frizzled | |
| 120 | CT16140 | CG7496 | 4.e−30 131 gi\|4827036\|ref\|NP_005082.1∥TNF superfamily, |
| | | | member 3 (LTB)-like (peptidoglycan recognition protein |
| 122 | CT37086 | cation-independent | 3.e−41 221.7 gi\|3876396\|emb\|CAB02981.1\|(Z81068) similar |
| | | mannose-6-phosphate | to LIM domain containing proteins (5 domains); cDNA EST |
| | | receptor | |
| 124 | CT37466 | pointed ets-like protein | H. sapiens 4885219 8.e−51 316 gi\|4885219\|ref\|NP_005229.1∥ |
| | | (D-ETS-2) | v-ets avian erythroblastosis virus E26 oncogene homolog 1 |
| | | | >gi\|119641\|sp |
| 126 | CT22943 | osa | |
| 128 | CT37466 | pointed ets-like prtein | |
| | | (D-ETS-2) | |
| 130 | CT42507 | D.melanogaster mRNA | 8.e−72 455 gi\|4505695\|ref\|NP_002604.1∥3-phosphoinositide |
| | | for serine/threonine | dependent protein kinase-1 >gi\|2407613 (AF017995) 3- |
| | | protein kinase | |
| 132 | CT42507 | D.melanogaster mRNA | |
| | | for serine/threonine | |
| | | protein kinase | |
| 134 | CT36957 | Protein Kinase DOA | 1.e−151 535 gi\|4502883\|ref\|NP_003984.1∥CDC-like kinase 2 |
| | | (Protein Darkener Of | isoform hclk2 >gi\|1705919\|sp\|P49760\|CLK2_HUMAN |
| | | Apricot | PROTEI |
| 136 | CT31823 | CG11399 | (AL137473) hypothetical protein [Homo sapiens], 0.51 |
| | | | J04444 g181239 Human cytochrome c-1 gene |
| 138 | | Dros Brother protein | |
| 140 | CT38229 | CG17249 | 5.e−13 76.5 gi\|5174643\|ref\|NP_005964.1\|>gi\|2498802\|s, 5.1 |
| | | | AF047002 g2896145 Human transcriptional coactivator ALY |
| 142 | CT25420 | CG8865 | H. sapiens 4589562 4.e−94 347 gi\|4589562\|dbj\|BAA76803.1\| |
| | | | (AB023176) KIAA0959 protein [Homo sapiens] |
| 144 | | Drosophila | |
| | | melanogaster mRNA for | |
| | | ferritin subunit 1 | |
| 146 | CT27454 | nuclear distribution | 2.e−74 280 gi\|1083762\|pir∥A55897 prolactin-induced T cell |
| | | gene C | protein c15 - rat >gi\|619907\|emb\|CAA57825\|(X82445) |
| 148 | CT20570 | Adenylate Kinase | |
| | | (ATP-AMP | |
| | | Transphosphorylase) | |
| 150 | CT18833 | ANON-66Da protein | 2.e−16 87 gi\|1350554\|sp\|P18615\|RDP_HUMAN RD |
| | | | PROTEIN >gi\|480387\|pir∥S36789 gene RD protein - human |
| | | | >gi\|190974 |
| 152 | | | |
| 154 | CT31389 | Drosophila | |
| | | melanogaster maelstrom | |
| | | (mael) | |
| 156 | CT23870 | activin receptor // punt | |
| | | receptor | |
| | | serine/threonine kinase | |
| 158 | | histone H4 | |
| 160 | CT40931 | Drosophila | 4.e−07 58.6 gi\|3413900\|dbj\|BAA32314\|(AB007938) |
| | | melanogaster GAGA | KIAA0469 protein [Homo sapiens] |
| | | transcription factor | |
| 162 | | BcDNA // serine/ | |
| | | threonine protein kinase | |
| 164 | | H2AvD gene for histone | |
| | | H2A variant | |
| 166 | CT20867 | CG6719 | 2.e−50 199 gi\|4507873\|ref\|NP_003363.1∥von Hippel-Lindau |
| | | | binding protein 1 >gi\|3212112\|emb\|CAA76761\|(Y17394) |
| 168 | | IRBP | |
| 170 | CT20438 | heat shock protein | 654 gi\|6225806\|sp\|O95757\|OS94_HUMAN OSMOTIC |
| | | cognate 70 | STRESS PROTEIN 94 (HEAT SHOCK 70-RELATED |
| | | | PROTEIN APG-1) >gi\| |
| 172 | | | |
| 174 | | | |
| 176 | | | |
| 178 | | | |
| 180 | CT30041 | CG10724 | 1.e−168 591 gi\|3420175\|gb\|AAD05042\|(AF020054) WDR1 |
| | | | protein [Gallus gallus] |
| 182 | | | |
| 184 | CT7410 | elongation factor 2b | 0 1357 gi\|3123205\|sp\|P29691\|EF2_CAEEL ELONGATION |
| | | | FACTOR 2 (EF-2) >gi\|3876400\|emb\|CAB02985.1\|(Z81068) |
| | | | simil |
| 186 | CT14690 | argos | 1e−122 2708327 (AE038405) argos [Musca domestica] |
| 188 | CT8431 | Hus-like protein | H. sapiens 4758576 3.e−27 123 gi\|4758576\|ref\|NP_004498.1∥ |
| | | | HUS1 (S. pombe) checkpoint homolog |
| | | | >gi\|2980665\|emb\|CAA76518.1\|(Y16893) |
| 190 | | | |
| 192 | CT21861 | pyruvate kinase (Pyk) | 0 636 gi\|125598\|sp\|P11979\|KPY1_FELCA PYRUVATE |
| | | gene | KINASE, M1 ISOZYME (PYRUVATE KINASE MUSCLE |
| | | | ISOZYME) >gi\|8908 |
| 194 | CT26561 | CG9351 | 1.e−118 428 gi\|2315451 (AF016448) No definition line found |
| | | | [Caenorhabditis elegans] |
| 196 | | | |
| 198 | CT42625 | casein kinase I (dbt) | |
| 200 | CT28337 | kiwi UDP-glucose | 0 660 gi\|4507813\|ref\|NP_003350.1∥UDP-glucose |
| | | dehydrogenase | dehydrogenase >gi\|6175086\|sp\|O60701\|UGDH_HUMAN |
| | | | UDP-GLUCOSE |
| 202 | | | |
| 204 | | G protein alpha subunit | |
| | | gene | |
| 206 | CT1010 | extramacrochaetae | |
| | | (emc) | |
| 208 | | (CKI-ALPHA) | |
| 210 | | ecdysone-inducible | |
| | | gene E75A | |
| 212 | CT24290 | ecdysone-inducible | 6166165 0 769.8 gi\|6166165\|sp\|Q08893\|E75_MANSE |
| | | gene E75B | ECDYSONE-INDUCIBLE PROTEIN E75 |
| 214 | | Rga | |
| 216 | | paramyosin | |
| 218 | CT42625 | casein kinase I (dbt) | |
| 220 | | | |
| 222 | | | |
| 224 | CT23357 | phosducin-like protein | 4.e−51 202 gi\|5912172\|emb\|CAB56011.1\|(AL117602) |
| | | | hypothetical protein [Homo sapiens] |
| 226 | CT23245 | CG7623 | C. elegans 2315363 2.e−59 231 gi\|2315363 (AF016441) No |
| | | | definition line found [Caenorhabditis elegans] |
| 228 | CT30379 | CG10849 | 6.e−88 324 gi\|2144098\|pir∥I56573 SC2 - rat |
| | | | >gi\|256994\|bbs\|115268 (S45663) SC2=synaptic glycoprotein |
| | | | [rats, bra |
| 230 | | | |
| 232 | CT5336 | CG12078 | H. sapiens 4128029 1.e−38 160 gi\|4128029\|emb\|CAA09865\| |
| | | | (AJ011916) hypothetical protein [Homo sapiens] |
| 234 | | fused protein kinase | |
| 236 | CT29244 | | |
| 238 | L08811 | daschous (adherin) | |
| 240 | | | |
| 242 | CT42625 | casein kinase I (dbt) | |
| 244 | | | ABC1 transporter; ABC-type ATPase Magnaporthe grisea |
| 246 | CT18629 | cyclin A | 3.e−72 274 gi\|116170\|sp\|P24861\|CG2A_PATVU |
| | | | G2/MITOTIC-SPECIFIC CYCLIN A >gi\|84527\|pir∥S17792 |
| | | | cyclin A - common |
| 248 | | | (DNA (cytosine-5-)-methyltransferase sea urchin) |
| 250 | CT22273 | fibroblast growth factor | i.e−113 461.3 gi\|558584\|emb\|CAA68679\|(Y00665) tyrosine |
| | | receptor homolog DFR1 | kinase [Homo sapiens] |
| 252 | CT22775 | (Ca2+−transporting | 1026 gi\|285369\|pir∥A42764 Ca2+−transporting ATPase (EC |
| | | ATPase chicken) | 3.6.1.38) - rat >gi\|202862 (M93017) [Rat alternat |
| 254 | | ald gene for aldolase | |
| 256 | CT24935 | karyopherin alpha 1 | 1.e−180 633 gi\|4504903\|ref\|NP_002260.1∥karyopherin alpha |
| | | | 5; importin alpha 6 >gi\|3122273\|sp\|O15131\|IMA6_HUMAN |
| 258 | | glutamate | |
| | | dehydrogenase | |
| 260 | | LD21334 unknown | |
| | | mRNA | |
| 262 | | | |
| 264 | | | |
| 266 | | | |
| 268 | CT39178 | phosphate transporter | 1.e−143 508 gi\|127276\|sp\|P16036\|MPCP_RAT |
| | | precursor (MPCP) | MITOCHONDRIAL PHOSPHATE CARRIER PROTEIN |
| | | | PRECURSOR (PTP) >gi\|112124\|pir\| |
| 270 | CT4906 | GAL4 enhancer trap | 6.e−93 340 gi\|1154645\|emb\|CAA644O2.1\|(X94917) head- |
| | | line | elevated expression in 0.9 kb [Drosophila melanogaster] |
| 272 | | cuticle proteins part of | |
| | | ANT-C gene | |
| 274 | | | |
| 276 | CT10611 | CG3172 | 9.e−99 361 gi\|6679541\|ref\|NP_032997.1∥protein tyrosine |
| | | | kinase 9 >gi\|1769577 (U82324) A6 protein tyrosine kina |
| 278 | CT27808 | CG9852, upstream of | 1.e−135 481 gi\|85010\|pir∥JQ1024 hypothetical 30K protein |
| | | RpII140 | (DmRP140 5′ region) - fruit fly (Drosophila melanogast |
| 280 | CT18415 | CG589, myosin | 9.e−86 381.5 gi\|633040\|dbj\|BAA07202\|(D37986) 130 kDa |
| | | phosphatase like | myosin-binding subunit of smooth muscle myosin phophatase |
| 282 | CT19500 | twins, phosphoprotein | 0 705.6 gi\|4506019\|ref\|NP_002708.1∥protein phosphatase 2 |
| | | phosphatase 2A 55 kDa | (formerly 2A), regulatory subunit B (PR 52), alph |
| | | regulatory subunit | |
| 284 | CT22097 | CG7150 | H. sapiens 3258663 4.e−31 217 gi\|3258663 (AF064094) |
| | | | KL04P [Homo sapiens] |
| 286 | CT24102 | CG8045, Su(Raf)3B, | Remainders 6634778 6.e−48 342 |
| | | d14-3-3epsilon, | gi\|6634778\|gb\|AAF19758.1\|AC009917\|17 (AC009917) |
| | | | Contains similarity to gi\|629253 1mbW protein from S |
| 288 | | STS Dm15553 | |
| 290 | CT2537 | cytochrome B561 | 4.e−36 153 gi\|461668\|sp\|P34465\|C561_CAEEL PUTATIVE |
| | | | CYTOCHROME B561 (CYTOCHROME B-561) |
| | | | >gi\|482195\|pir∥S40988 hy |
| 292 | CT23608 | CG7769 | H. sapiens 1136228 0 1349 gi\|1136228 (U32986) UV- |
| | | | damaged DNA binding factor [Homo sapiens] |
| | | | >gi\|1588524\|prf∥2208446A xeroderma |
| 294 | | catalase (from EST) | |
| 296 | | | |
| 298 | | Nuclear Pore Complex | |
| | | Protein NUP98 | |
| 300 | CT21460 | LK6 protein kinase | i.e−115 419 gi\|4464284\|gb\|AAD21217\|(AC007136) Putative |
| | | (LK6) | map kinase interacting kinase [Homo sapiens] [Homo sapie |
| 302 | CT14980 | CG4699 | Remainders 6331206 5.e−17 91.7 |
| | | | gi\|6331206\|dbj\|BAA86581.1\|(AB033093) KIAA1267 protein |
| | | | [Homo sapiens] |
| 304 | | | (nonmuscle myosin heavy chain chicken) |
| 306 | | Atu | |
| 308 | SD10928 | | |
| 310 | CT5324 | CG11526 | C. elegans 1086830 9.e−91 335 gi\|1086830 (U41264) coded |
| | | | for by C. elegans cDNA yk20f8.5; coded for by C. elegans |
| | | | cDNA yk44g1.5; co |
| 312 | | | |
| 314 | | | |
| 316 | CT5324 | Rel/NF-kappa B | H. sapiens 4502089 5.e−14 271.6 |
| | | homolog (Relish) | gi\|4502089\|ref\|NP_000028.1∥ankyrin 1, erythrocytic |
| | | mRNA | >gi\|178646 (M28880) ankyrin [Homo sapiens] |
| 318 | CT27692 | | |
| 320 | CT25986 | DEAD-box protein | 0 881 gi\|4826686\|ref\|NP_004930.1∥DEAD/H (Asp-Glu-Ala- |
| | | | Asp/His) box polypeptide 1 >gi\|6919862\|sp\|Q92499\|DD |
| 322 | | | |
| 324 | | Dos protein; PH domain | |
| | | protein | |
| 326 | | | |
| 328 | CT34516 | cytochrome c oxidase | 9.e−81 300 gi\|6685358\|sp\|Q94514\|COXA_DROME |
| | | subunit Va preprotein | CYTOCHROME C OXIDASE POLYPEPTIDE VA, |
| | | | MITOCHONDRIAL PRECURSOR >gi\|165 |
| 330 | CT22777 | effete, UbcD1, | 5.e−83 309 gi\|464979\|sp\|P35129\|UBC2_CAEEL UBIQUITIN- |
| | | CT22799 | CONJUGATING ENZYME E2-17 KD (UBIQUITIN- |
| | | | PROTEIN LIGASE) (UBI |
| 332 | CT30099 | derailed, CT30136 | 3.e−72 358.7 gi\|1296650\|emb\|CAA65406\|(X96588) receptor |
| | | | tyrosine kinase [Homo sapiens] |
| 334 | CT29418 | CG10479 | |
| 336 | | | |
| 338 | | | |
| 340 | | | |
| 342 | CT14836 | failed axon connections | 5.e−28 127 gi\|3875233\|emb\|CAA99802.1\|(Z75531) similar to |
| | | protein | Glutathione S-transferases.; cDNA EST EMBL:T01925 com |
| 344 | | | |
| 346 | | 89B helicase | |
| 348 | | brabma associated | |
| | | protein 155kDa | |
| 350 | CT21153 | CG6833 | 2.e−42 173 gi\|1079321\|pir∥S53818 XPMC2 protein - African |
| | | | clawed frog >gi\|595380 (U10185) XPMC2 protein [Xenopu |
| 352 | | | |
| 354 | CT22295 | CG7228 | 3.e−75 283 gi\|6014727\|sp\|Q27367\|CRQ_DROME |
| | | | CROQUEMORT PROTEIN (D-CD36) |
| | | | >gi\|542557\|pir∥S43137 D-CD36 protein - f |
| 356 | CT9784 | prophosphoribosylamid | |
| | | otransferase (Prat) | |
| 358 | | | |
| 360 | | | |

### DEFINITIONS

[0021] For clarity, certain terms used in the specification are defined and used as follows:

[0022] “Associated with/operatively linked” refer to two nucleic acid sequences that are related physically or functionally. For example, a promoter or regulatory DNA sequence is said to be “associated with” a DNA sequence that codes for an RNA or a protein if the two sequences are operatively linked, or situated such that the regulator DNA sequence will affect the expression level of the coding or structural DNA sequence.

[0023] A “chimeric construct” is a recombinant nucleic acid sequence in which a promoter or regulatory nucleic acid sequence is operatively linked to, or associated with, a nucleic acid sequence that codes for an mRNA or which is expressed as a protein, such that the regulatory nucleic acid sequence is able to regulate transcription or expression of the associated nucleic acid sequence. The regulatory nucleic acid sequence of the chimeric construct is not normally operatively linked to the associated nucleic acid sequence as found in nature.

[0024] Co-factor: natural reactant, such as an organic molecule or a metal ion, required in an enzyme-catalyzed reaction. A co-factor is e.g. NAD(P), riboflavin (including FAD and FMN), folate, molybdopterin, thiamin, biotin, lipoic acid, pantothenic acid and coenzyme A, S-adenosylmethionine, pyridoxal phosphate, ubiquinone, menaquinone. Optionally, a co-factor can be regenerated and reused.

[0025] A “coding sequence” is a nucleic acid sequence that is transcribed into RNA such as mRNA, rRNA, tRNA, snRNA, sense RNA or antisense RNA. Preferably the RNA is then translated in an organism to produce a protein.

[0026] Complementary: “complementary” refers to two nucleotide sequences that comprise antiparallel nucleotide sequences capable of pairing with one another upon formation of hydrogen bonds between the complementary base residues in the antiparallel nucleotide sequences. “Conservatively modified variations” of a particular nucleic acid sequence refers to those nucleic acid sequences that encode identical or essentially identical amino acid sequences, or where the nucleic acid sequence does not encode an amino acid sequence, to essentially identical sequences. Because of the degeneracy of the genetic code, a large number of functionally identical nucleic acids encode any given polypeptide. For instance the codons CGT, CGC, CGA, CGG, AGA, and AGG all encode the amino acid arginine. Thus, at every position where an arginine is specified by a codon, the codon can be altered to any of the corresponding codons described without altering the encoded protein. Such nucleic acid variations are “silent variations” which are one species of “conservatively modified variations.” Every nucleic acid sequence described herein which encodes a protein also describes every possible silent variation, except where otherwise noted. One of skill will recognize that each codon in a nucleic acid (except ATG, which is ordinarily the only codon for methionine) can be modified to yield a functionally identical molecule by standard techniques. Accordingly, each “silent variation” of a nucleic acid which encodes a protein is implicit in each described sequence.

[0027] Furthermore, one of skill will recognize that individual substitutions deletions or additions that alter, add or delete a single amino acid or a small percentage of amino acids (typically less than 5%, more typically less than 1%) in an encoded sequence are “conservatively modified variations,” where the alterations result in the substitution of an amino acid with a chemically similar amino acid. Conservative substitution tables providing functionally similar amino acids are well known in the art. The following five groups each contain amino acids that are conservative substitutions for one another: Aliphatic: Glycine (G), Alanine (A), Valine (V), Leucine (L), Isoleucine (I); Aromatic:Phenylalanine (F), Tyrosine (Y), Tryptophan (W); Sulfur-containing:Methionine (M), Cysteine (C); Basic:Arginine (R), Lysine (K), Histidine (H); Acidic: Aspartic acid (D), Glutamic acid (E), Asparagine (N), Glutamine (Q). See also, Creighton (1984) Proteins, W. H. Freeman and Company. In addition, individual substitutions, deletions or additions which alter, add or delete a single amino acid or a small percentage of amino acids in an encoded sequence are also “conservatively modified variations.”

[0028] DNA Shuffling: DNA shuffling is a method to rapidly, easily and efficiently introduce mutations or rearrangements, preferably randomly, in a DNA molecule or to generate exchanges of DNA sequences between two or more DNA molecules, preferably randomly. The DNA molecule resulting from DNA shuffling is a shuffled DNA molecule that is a non-naturally occurring DNA molecule derived from at least one template DNA molecule. The shuffled DNA encodes an enzyme modified with respect to the enzyme encoded by the template DNA, and preferably has an altered biological activity with respect to the enzyme encoded by the template DNA.

[0029] Enzyme/Protein Activity: means herein the ability of an enzyme (or protein) to catalyze the conversion of a substrate into a product. A substrate for the enzyme comprises the natural substrate of the enzyme but also comprises analogues of the natural substrate, which can also be converted, by the enzyme into a product or into an analogue of a product. The activity of the enzyme is measured for example by determining the amount of product in the reaction after a certain period of time, or by determining the amount of substrate remaining in the reaction mixture after a certain period of time. The activity of the enzyme is also measured by determining the amount of an unused co-factor of the reaction remaining in the reaction mixture after a certain period of time or by determining the amount of used co-factor in the reaction mixture after a certain period of time. The activity of the enzyme is also measured by determining the amount of a donor of free energy or energy-rich molecule (e.g. ATP, phosphoenolpyruvate, acetyl phosphate or phosphocreatine) remaining in the reaction mixture after a certain period of time or by determining the amount of a used donor of free energy or energy-rich molecule (e.g. ADP, pyruvate, acetate or creatine) in the reaction mixture after a certain period of time.

[0030] Essential: an “essential” Drosophila melanogaster nucleotide sequence is a nucleotide sequence encoding a protein such as e.g. a biosynthetic enzyme, receptor, signal transduction protein, structural gene product, or transport protein that is essential to the growth or survival of the insect.

[0031] Expression Cassette: “Expression cassette” as used herein means a DNA sequence capable of directing expression of a particular nucleotide sequence in an appropriate host cell, comprising a promoter operatively linked to the nucleotide sequence of interest which is operatively linked to termination signals. It also typically comprises sequences required for proper translation of the nucleotide sequence. The coding region usually codes for a protein of interest but may also code for a functional RNA of interest, for example antisense RNA or a nontranslated RNA, in the sense or antisense direction. The expression cassette comprising the nucleotide sequence of interest may be chimeric, meaning that at least one of its components is heterologous with respect to at least one of its other components. The expression cassette may also be one which is naturally occurring but has been obtained in a recombinant form useful for heterologous expression. Typically, however, the expression cassette is heterologous with respect to the host, i.e., the particular DNA sequence of the expression cassette does not occur naturally in the host cell and must have been introduced into the host cell or an ancestor of the host cell by a transformation event. The expression of the nucleotide sequence in the expression cassette may be under the control of a constitutive promoter or of an inducible promoter which initiates transcription only when the host cell is exposed to some particular external stimulus. In the case of a multicellular organism, such as an insect, the promoter can also be specific to a particular tissue or organ or stage of development.

[0032] Gene: the term “gene” is used broadly to refer to any segment of DNA associated with a biological function. Thus, genes include coding sequences and/or the regulatory sequences required for their expression. Genes also include nonexpressed DNA segments that, for example, form recognition sequences for other proteins. Genes can be obtained from a variety of sources, including cloning from a source of interest or synthesizing from known or predicted sequence information, and may include sequences designed to have desired parameters.

[0033] Heterologous/exogenous: The terms “heterologous” and “exogenous” when used herein to refer to a nucleic acid sequence (e.g. a DNA sequence) or a gene, refer to a sequence that originates from a source foreign to the particular host cell or, if from the same source, is modified from its original form. Thus, a heterologous gene in a host cell includes a gene that is endogenous to the particular host cell but has been modified through, for example, the use of DNA shuffling. The terms also include non-naturally occurring multiple copies of a naturally occurring DNA sequence. Thus, the terms refer to a DNA segment that is foreign or heterologous to the cell, or homologous to the cell but in a position within the host cell nucleic acid in which the element is not ordinarily found. Exogenous DNA segments are expressed to yield exogenous polypeptides.

[0034] A “homologous” nucleic acid (e.g. DNA) sequence is a nucleic acid (e.g. DNA) sequence naturally associated with a host cell into which it is introduced.

[0035] The terms “identical” or percent “identity” in the context of two or more nucleic acid or protein sequences, refer to two or more sequences or subsequences that are the same or have a specified percentage of amino acid residues or nucleotides that are the same, when compared and aligned for maximum correspondence, as measured using one of the following sequence comparison algorithms or by visual inspection.

[0036] Inhibitor: a chemical substance that inactivates the enzymatic activity of an enzyme (or protein) of interest. The term “insecticide” is used herein to define an inhibitor when applied to an insect at any stage of development.

[0037] Insecticide: a chemical substance used to kill or inhibit the growth or viability of insects at any stage of development.

[0038] Interaction: quality or state of mutual action such that the effectiveness or toxicity of one protein or compound on another protein is inhibitory (antagonists) or enhancing (agonists).

[0039] A nucleic acid sequence is “isocoding with” a reference nucleic acid sequence when the nucleic acid sequence encodes a polypeptide having the same amino acid sequence as the polypeptide encoded by the reference nucleic acid sequence.

[0040] An “isolated” nucleic acid molecule or an isolated enzyme is a nucleic acid molecule or enzyme that, by the hand of man, exists apart from its native environment and is therefore not a product of nature. An isolated nucleic acid molecule or enzyme may exist in a purified form or may exist in a non-native environment such as, for example, a recombinant host cell.

[0041] Mature Protein: protein that is normally targeted to a cellular organelle and from which the transit peptide has been removed.

[0042] Minimal Promoter: promoter elements, particularly a TATA element, that are inactive or that have greatly reduced promoter activity in the absence of upstream activation. In the presence of a suitable transcription factor, the minimal promoter functions to permit transcription.

[0043] Modified Enzyme Activity: enzyme activity different from that which naturally occurs in an insect (i.e. enzyme activity that occurs naturally in the absence of direct or indirect manipulation of such activity by man), which is tolerant to inhibitors that inhibit the naturally occurring enzyme activity.

[0044] Native: refers to a gene that is present in the genome of an untransformed insect cell.

[0045] Naturally occurring: the term “naturally occurring” is used to describe an object that can be found in nature as distinct from being artificially produced by man. For example, a protein or nucleotide sequence present in an organism (including a virus), which can be isolated from a source in nature and which has not been intentionally modified by man in the laboratory, is naturally occurring.

[0046] Nucleic acid: the term “nucleic acid” refers to deoxyribonucleotides or ribonucleotides and polymers thereof in either single- or double-stranded form. Unless specifically limited, the term encompasses nucleic acids containing known analogues of natural nucleotides which have similar binding properties as the reference nucleic acid and are metabolized in a manner similar to naturally occurring nucleotides. Unless otherwise indicated, a particular nucleic acid sequence also implicitly encompasses conservatively modified variants thereof (e.g. degenerate codon substitutions) and complementary sequences and as well as the sequence explicitly indicated. Specifically, degenerate codon substitutions may be achieved by generating sequences in which the third position of one or more selected (or all) codons is substituted with mixed-base and/or deoxyinosine residues (Batzer et al., Nucleic Acid Res. 19: 5081 (1991); Ohtsuka et al., J. Biol. Chem. 260: 2605-2608 (1985); Rossolini et al., Mol. Cell. Probes 8: 91-98 (1994)). The terms “nucleic acid” or “nucleic acid sequence” may also be used interchangeably with gene, cDNA, and mRNA encoded by a gene.

[0047] “ORF” means open reading frame.

[0048] Purified: the term “purified,” when applied to a nucleic acid or protein, denotes that the nucleic acid or protein is essentially free of other cellular components with which it is associated in the natural state. It is preferably in a homogeneous state although it can be in either a dry or aqueous solution. Purity and homogeneity are typically determined using analytical chemistry techniques such as polyacrylamide gel electrophoresis or high performance liquid chromatography. A protein which is the predominant species present in a preparation is substantially purified. The term “purified” denotes that a nucleic acid or protein gives rise to essentially one band in an electrophoretic gel. Particularly, it means that the nucleic acid or protein is at least about 50% pure, more preferably at least about 85% pure, and most preferably at least about 99% pure.

[0049] Two nucleic acids are “recombined” when sequences from each of the two nucleic acids are combined in a progeny nucleic acid. Two sequences are “directly” recombined when both of the nucleic acids are substrates for recombination. Two sequences are “indirectly recombined” when the sequences are recombined using an intermediate such as a cross-over oligonucleotide. For indirect recombination, no more than one of the sequences is an actual substrate for recombination, and in some cases, neither sequence is a substrate for recombination.

[0050] “Regulatory elements” refer to sequences involved in controlling the expression of a nucleotide sequence. Regulatory elements comprise a promoter operatively linked to the nucleotide sequence of interest and termination signals. They also typically encompass sequences required for proper translation of the nucleotide sequence.

[0051] Significant Increase: an increase in enzymatic activity that is larger than the margin of error inherent in the measurement technique, preferably an increase by about 2-fold or greater of the activity of the wild-type enzyme in the presence of the inhibitor, more preferably an increase by about 5-fold or greater, and most preferably an increase by about 10-fold or greater.

[0052] Substantially identical: the phrase “substantially identical,” in the context of two nucleic acid or protein sequences, refers to two or more sequences or subsequences that have at least 60%, preferably 80%, more preferably 90, even more preferably 95%, and most preferably at least 99% nucleotide or amino acid residue identity, when compared and aligned for maximum correspondence, as measured using one of the following sequence comparison algorithms or by visual inspection. Preferably, the substantial identity exists over a region of the sequences that is at least about 50 residues in length, more preferably over a region of at least about 100 residues, and most preferably the sequences are substantially identical over at least about 150 residues. In an especially preferred embodiment, the sequences are substantially identical over the entire length of the coding regions. Furthermore, substantially identical nucleic acid or protein sequences perform substantially the same function.

[0053] For sequence comparison, typically one sequence acts as a reference sequence to which test sequences are compared. When using a sequence comparison algorithm, test and reference sequences are input into a computer, subsequence coordinates are designated if necessary, and sequence algorithm program parameters are designated. The sequence comparison algorithm then calculates the percent sequence identity for the test sequence(s) relative to the reference sequence, based on the designated program parameters.

[0054] Optimal alignment of sequences for comparison can be conducted, e.g., by the local homology algorithm of Smith & Waterman, Adv. Appl. Math. 2: 482 (1981), by the homology alignment algorithm of Needleman & Wunsch, J. Mol. Biol. 48: 443 (1970), by the search for similarity method of Pearson & Lipman, Proc. Nat'l. Acad. Sci. USA 85: 2444 (1988), by computerized implementations of these algorithms (GAP, BESTFIT, FASTA, and TFASTA in the Wisconsin Genetics Software Package, Genetics Computer Group, 575 Science Dr., Madison, Wis.), or by visual inspection (see generally, Ausubel et al., infra).

[0055] One example of an algorithm that is suitable for determining percent sequence identity and sequence similarity is the BLAST algorithm, which is described in Altschul et al., J. Mol. Biol. 215: 403-410 (1990). Software for performing BLAST analyses is publicly available through the National Center for Biotechnology Information on the world wide web at ncbi.nlm.nih.gov/. This algorithm involves first identifying high scoring sequence pairs (HSPs) by identifying short words of length W in the query sequence, which either match or satisfy some positive-valued threshold score T when aligned with a word of the same length in a database sequence. T is referred to as the neighborhood word score threshold (Altschul et al., 1990). These initial neighborhood word hits act as seeds for initiating searches to find longer HSPs containing them. The word hits are then extended in both directions along each sequence for as far as the cumulative alignment score can be increased. Cumulative scores are calculated using, for nucleotide sequences, the parameters M (reward score for a pair of matching residues; always >0) and N (penalty score for mismatching residues; always <0). For amino acid sequences, a scoring matrix is used to calculate the cumulative score. Extension of the word hits in each direction are halted when the cumulative alignment score falls off by the quantity X from its maximum achieved value, the cumulative score goes to zero or below due to the accumulation of one or more negative-scoring residue alignments, or the end of either sequence is reached. The BLAST algorithm parameters W, T, and X determine the sensitivity and speed of the alignment. The BLASTN program (for nucleotide sequences) uses as defaults a wordlength (W) of 11, an expectation (E) of 10, a cutoff of 100, M=5, N=4, and a comparison of both strands. For amino acid sequences, the BLASTP program uses as defaults a wordlength (W) of 3, an expectation (E) of 10, and the BLOSUM62 scoring matrix (see Henikoff & Henikoff, Proc. Natl. Acad. Sci. USA 89: 10915 (1989)).

[0056] In addition to calculating percent sequence identity, the BLAST algorithm also performs a statistical analysis of the similarity between two sequences (see, e.g., Karlin & Altschul, Proc. Nat'l. Acad. Sci. USA 90: 5873-5787 (1993)). One measure of similarity provided by the BLAST algorithm is the smallest sum probability (P(N)), which provides an indication of the probability by which a match between two nucleotide or amino acid sequences would occur by chance. For example, a test nucleic acid sequence is considered similar to a reference sequence if the smallest sum probability in a comparison of the test nucleic acid sequence to the reference nucleic acid sequence is less than about 0.1, more preferably less than about 0.01, and most preferably less than about 0.001.

[0057] Another indication that two nucleic acid sequences are substantially identical is that the two molecules hybridize to each other under stringent conditions. The phrase “hybridizing specifically to” refers to the binding, duplexing, or hybridizing of a molecule only to a particular nucleotide sequence under stringent conditions when that sequence is present in a complex mixture (e.g., total cellular) DNA or RNA. “Bind(s) substantially” refers to complementary hybridization between a probe nucleic acid and a target nucleic acid and embraces minor mismatches that can be accommodated by reducing the stringency of the hybridization media to achieve the desired detection of the target nucleic acid sequence.

[0058] “Stringent hybridization conditions” and “stringent hybridization wash conditions” in the context of nucleic acid hybridization experiments such as Southern and Northern hybridizations are sequence dependent, and are different under different environmental parameters. Longer sequences hybridize specifically at higher temperatures. An extensive guide to the hybridization of nucleic acids is found in Tijssen (1993) Laboratory Techniques in Biochemistry and Molecular Biology-Hybridization with Nucleic Acid Probes part I chapter 2 “Overview of principles of hybridization and the strategy of nucleic acid probe assays” Elsevier, N.Y. Generally, highly stringent hybridization and wash conditions are selected to be about 5° C. lower than the thermal melting point (Tₘ) for the specific sequence at a defined ionic strength and pH. Typically, under “stringent conditions” a probe will hybridize to its target subsequence, but to no other sequences.

[0059] The Tₘ is the temperature (under defined ionic strength and pH) at which 50% of the target sequence hybridizes to a perfectly matched probe. Very stringent conditions are selected to be equal to the Tₘ for a particular probe. An example of stringent hybridization conditions for hybridization of complementary nucleic acids which have more than 100 complementary residues on a filter in a Southern or northern blot is 50% formamide with 1 mg of heparin at 42° C., with the hybridization being carried out overnight. An example of highly stringent wash conditions is 0.15M NaCl at 72° C. for about 15 minutes. An example of stringent wash conditions is a 0.2×SSC wash at 65° C. for 15 minutes (see, Sambrook, infra, for a description of SSC buffer). Often, a high stringency wash is preceded by a low stringency wash to remove background probe signal. An example medium stringency wash for a duplex of, e.g., more than 100 nucleotides, is 1×SSC at 45° C. for 15 minutes. An example low stringency wash for a duplex of, e.g., more than 100 nucleotides, is 4-6×SSC at 40° C. for 15 minutes. For short probes (e.g., about 10 to 50 nucleotides), stringent conditions typically involve salt concentrations of less than about 1.0 M Na ion, typically about 0.01 to 1.0 M Na ion concentration (or other salts) at pH 7.0 to 8.3, and the temperature is typically at least about 30° C. Stringent conditions can also be achieved with the addition of destabilizing agents such as formamide. In general, a signal to noise ratio of 2× (or higher) than that observed for an unrelated probe in the particular hybridization assay indicates detection of a specific hybridization. Nucleic acids that do not hybridize to each other under stringent conditions are still substantially identical if the proteins that they encode are substantially identical. This occurs, e.g., when a copy of a nucleic acid is created using the maximum codon degeneracy permitted by the genetic code.

[0060] The following are examples of sets of hybridization/wash conditions that may be used to clone homologous nucleotide sequences that are substantially identical to reference nucleotide sequences of the present invention: a reference nucleotide sequence preferably hybridizes to the reference nucleotide sequence in 7% sodium dodecyl sulfate (SDS), 0.5 M NaPO₄, 1 mM EDTA at 50° C. with washing in 2×SSC, 0.1% SDS at 50° C., more desirably in 7% sodium dodecyl sulfate (SDS), 0.5 M NaPO₄, 1 mM EDTA at 50° C. with washing in 1×SSC, 0.1% SDS at 50° C., more desirably still in 7% sodium dodecyl sulfate (SDS), 0.5 M NaPO₄, 1 mM EDTA at 50° C. with washing in 0.5×SSC, 0.1% SDS at 50° C., preferably in 7% sodium dodecyl sulfate (SDS), 0.5 M NaPO₄, 1 mM EDTA at 50° C. with washing in 0.1×SSC, 0.1% SDS at 50° C., more preferably in 7% sodium dodecyl sulfate (SDS), 0.5 M NaPO₄, 1 mM EDTA at 50° C. with washing in 0.1×SSC, 0.1% SDS at 65° C.

[0061] A further indication that two nucleic acid sequences or proteins are substantially identical is that the protein encoded by the first nucleic acid is immunologically cross reactive with, or specifically binds to, the protein encoded by the second nucleic acid. Thus, a protein is typically substantially identical to a second protein, for example, where the two proteins differ only by conservative substitutions.

[0062] The phrase “specifically (or selectively) binds to an antibody,” or “specifically (or selectively) immunoreactive with,” when referring to a protein or peptide, refers to a binding reaction which is determinative of the presence of the protein in the presence of a heterogeneous population of proteins and other biologics. Thus, under designated immunoassay conditions, the specified antibodies bind to a particular protein and do not bind in a significant amount to other proteins present in the sample. Specific binding to an antibody under such conditions may require an antibody that is selected for its specificity for a particular protein. For example, antibodies raised to the protein with the amino acid sequence encoded by any of the nucleic acid sequences of the invention can be selected to obtain antibodies specifically immunoreactive with that protein and not with other proteins except for polymorphic variants. A variety of immunoassay formats may be used to select antibodies specifically immunoreactive with a particular protein. For example, solid-phase ELISA immunoassays, Western blots, or immunohistochemistry are routinely used to select monoclonal antibodies specifically immunoreactive with a protein. See Harlow and Lane (1988) Antibodies, A Laboratory Manual, Cold Spring Harbor Publications, New York “Harlow and Lane”), for a description of immunoassay formats and conditions that can be used to determine specific immunoreactivity. Typically a specific or selective reaction will be at least twice background signal or noise and more typically more than 10 to 100 times background.

[0063] A “subsequence” refers to a sequence of nucleic acids or amino acids that comprise a part of a longer sequence of nucleic acids or amino acids (e.g., protein) respectively.

[0064] “Synthetic” refers to a nucleotide sequence comprising structural characters that are not present in the natural sequence. For example, an artificial sequence that resembles more closely the G+C content and the normal codon distribution of dicot and/or monocot genes is said to be synthetic.

[0065] Substrate: a substrate is the molecule that an enzyme naturally recognizes and converts to a product in the biochemical pathway in which the enzyme naturally carries out its function, or is a modified version of the molecule, which is also recognized by the enzyme and is converted by the enzyme to a product in an enzymatic reaction similar to the naturally-occurring reaction.

[0066] Target gene: A “target gene” is any gene in an insect cell. For example, a target gene is a gene of known function or is a gene whose function is unknown, but whose total or partial nucleotide sequence is known. Alternatively, the function of a target gene and its nucleotide sequence are both unknown. A target gene is a native gene of the insect cell or is a heterologous gene that had previously been introduced into the insect cell or a parent cell of said insect cell, for example by genetic transformation. A heterologous target gene is stably integrated in the genome of the insect cell or is present in the insect cell as an extrachromosomal molecule, e.g. as an autonomously replicating extrachromosomal molecule.

[0067] Transformation: a process for introducing heterologous DNA into a cell, tissue, or insect. Transformed cells, tissues, or insects are understood to encompass not only the end product of a transformation process, but also transgenic progeny thereof.

[0068] “Transformed,” “transgenic,” and “recombinant” refer to a host organism such as a bacterium or a plant into which a heterologous nucleic acid molecule has been introduced. The nucleic acid molecule can be stably integrated into the genome of the host or the nucleic acid molecule can also be present as an extrachromosomal molecule. Such an extrachromosomal molecule can be auto-replicating. Transformed cells, tissues, or plants are understood to encompass not only the end product of a transformation process, but also transgenic progeny thereof. A “non-transformed,” “non-transgenic,” or “non-recombinant” host refers to a wild-type organism, e.g., a bacterium or plant, which does not contain the heterologous nucleic acid molecule.

[0069] Viability: “viability” as used herein refers to a fitness parameter of an insect. Insects are assayed for their homozygous performance of Drosophila larval development, indicating which proteins are indispensable to maintain larval life in Drosophila.

### DETAILED DESCRIPTION OF THE INVENTION

[0070] I. Identification Of Essential Drosophila melanogaster Nucleotide Sequences Using Transposable Element Insertion Mutagenesis

[0071] As shown in the examples below, the identification of novel nucleotide sequences, as well as the essentiality of the nucleotide sequences for normal insect viability, have been demonstrated in Drosophila using P-element transposable insertion mutagenesis. Having established the essentiality of the function of the encoded proteins in Drosophila and having identified the nucleotide sequences encoding these essential proteins, the inventors thereby provide an important and sought-after tool for new insecticide development.

[0072] A lethal phenotype caused by insertion of a P-element indicates that the affected nucleotide sequence codes for an essential protein in the insect. The characterization of the insertion site using flanking sequence DNA is needed to associate an individual larval lethal line with specific nucleotide sequences. Genomic DNA adjacent to the 5′ and/or 3′ end of the P-element from the insertion line is generated using inverse PCR.

[0073] II. Determining The Complete Coding Sequences Of The Essential Drosophila Nucleotide Sequences

[0074] The essential Drosophila nucleotide sequences are identified by isolating nucleotide sequences flanking the P-element insertion and aligning that sequence with genomic Drosophila sequence obtained from the Celera Drosophila database. The protein prediction for each genomic region is obtained by use of an exon algorithm program such as GeneMark. All exon algorithm programs currently used for prediction of proteins are susceptible to inaccuracies, including incomplete predictions of coding sequences, missing alternative splice variants, combining of nearby exons of adjacent genes, and mistranslation at intron-exon borders. The prediction of a complete coding sequence can be confirmed by several methods including polymerase chain reaction (PCR) amplification using the 5′ and 3′ sequence to verify the message, reverse transcription PCR (rtPCR) using an oligonucleotide internal sequence to identify the 5′ and/or 3′ end, and screening of cDNA libraries from insect tissues with probes made from a particular sequence to isolate a true full-length clone. To confirm that the message size is accurate, a Northern blot can be hybridized with a probe from the nucleotide sequence. In addition, matches to the Drosophila EST database helps to confirm existence of message and gives information about the temporal and spatial pattern of expression. Mutation-causing P elements are known to preferentially cluster in the 5′ region of affected genes (Spradling et al., Proc. Natl. Acad. Sci. USA 92: 10824-10830 (1995)), a tendency that increases the chance of recovering overlaps between short flanking sequences and 5′ ESTs. The present invention therefore provides a number of essential nucleotide sequences as well as the amino acid sequences encoded thereby. cDNA clone sequences are set forth in even numbered SEQ ID NOs:14-360. The corresponding encoded amino acid sequences are set forth in odd numbered SEQ ID NOs:15-361.

[0075] The isolated gene sequences disclosed herein may be manipulated according to standard genetic engineering techniques to suit any desired purpose. For example, an entire Drosophila gene sequence or portions thereof may be used as a probe capable of specifically hybridizing to coding sequences and messenger RNAs. To achieve specific hybridization under a variety of conditions, such probes include, e.g. sequences that are unique among insect nucleotide sequences for a particular protein of interest and are at least 10 nucleotides in length, preferably at least 20 nucleotides in length, and most preferably at least 50 nucleotides in length. Such probes are used to amplify and analyze related nucleotide sequences from a chosen organism via PCR. This technique is useful to isolate additional insect nucleotide sequences from a desired organism or as a diagnostic assay to determine the presence of particular nucleotide sequences in an organism. This technique also is used to detect the presence of altered nucleotide sequences associated with a particular condition of interest such as insecticide tolerance, poor health, etc.

[0076] Gene-specific hybridization probes also are used to quantify levels of a particular gene mRNA in an insect using standard techniques such as Northern blot analysis. This technique is useful as a diagnostic assay to detect altered levels of gene expression that are associated with particular conditions such as enhanced tolerance to insecticides that target a particular gene.

[0077] III. Recombinant Production Of Protein And Uses Thereof

[0078] For recombinant production of a protein of the invention in a host organism, a nucleotide sequence encoding the protein is inserted into an expression cassette designed for the chosen host and introduced into the host where it is recombinantly produced. The choice of the specific regulatory sequences such as promoter, signal sequence, 5′ and 3′ untranslated sequence, and enhancer appropriate for the chosen host is within the level of the skill of the routineer in the art. The resultant molecule, containing the individual elements linking in the proper reading frame, is inserted into a vector capable of being transformed into the host cell. Suitable expression vectors and methods for recombinant production of proteins are well known for host organisms such as E. coli, yeast, and insect cells (see, e.g., Lucknow and Summers, Bio/Technol. 6:47 (1988)). Additional suitable expression vectors are baculovirus expression vectors, e.g., those derived from the genome of Autographica californica nuclear polyhedrosis virus (AcMNPV). A preferred baculovirus/insect system is PVL1392(3) used to transfect Spodoptera frugiperda SF9 cells (ATCC) in the presence of linear Autographica californica baculovirus DNA (Phramingen, San Diego, Calif.). The resulting virus is used to infect HighFive Tricoplusia ni cells (Invitrogen, La Jolla, Calif.).

[0079] Recombinantly produced proteins are isolated and purified using a variety of standard techniques. The actual techniques used vary depending upon the host organism used, whether the protein is designed for secretion, and other such factors. Such techniques are well known to the skilled artisan (see, e.g. chapter 16 of Ausubel, F. et al., “Current Protocols in Molecular Biology”, pub. by John Wiley & Sons, Inc. (1994).

[0080] IV. Assays For Characterizing The Proteins

[0081] Recombinantly produced proteins are useful for a variety of purposes. For example, they can be used in in vitro assays to screen known insecticidal chemicals whose target has not been identified to determine if they inhibit protein activity. Such in vitro assays may also be used as more general screens to identify chemicals that inhibit such protein activity and that are therefore novel insecticide candidates. Recombinantly produced proteins may also be used to elucidate the complex structure of these molecules and to further characterize their association with known inhibitors in order to rationally design new inhibitory insecticides. Alternatively, the recombinant protein can be used to isolate antibodies or peptides that modulate the activity and are useful in transgenic solutions.

[0082] V. In vivo Inhibitor Assay: Discovery of Small Molecule Ligands That Interact with Proteins Of Unknown Function.

[0083] Having identified a protein as a potential insecticide target based on its essentiality for insect larval viability, a next step is to develop an assay that allows screening large numbers of chemicals to determine which ones interact with the protein. Although it is straightforward to develop assays for proteins of known function, developing assays with proteins of unknown functions can be more difficult.

[0084] To address this issue, novel technologies are used that can detect interactions between a protein and a ligand without knowing the biological function of the protein. A short description of three methods is presented, including fluorescence correlation spectroscopy, surface-enhanced laser desorption/ionization, and biacore technologies. In addition to those descibed here, there are additional methods that are currently being developed that are also amenable to automated, large-scale screening.

[0085] Fluorescence Correlation Spectroscopy (FCS) theory was developed in 1972 but it is only in recent years that the technology to perform FCS became available (Madge et al. (1972) Phys. Rev. Lett., 29: 705-708; Maiti et al. (1997) Proc. Natl. Acad. Sci. USA, 94: 11753-11757). FCS measures the average diffusion rate of a fluorescent molecule within a small sample volume. The sample size can be as low as 10³ fluorescent molecules and the sample volume as low as the cytoplasm of a single bacterium. The diffusion rate is a function of the mass of the molecule and decreases as the mass increases. FCS can therefore be applied to protein-ligand interaction analysis by measuring the change in mass and therefore in diffusion rate of a molecule upon binding. In a typical experiment, the target to be analyzed is expressed as a recombinant protein with a sequence tag, such as a poly-histidine sequence, inserted at the N- or C-terminus. The expression takes place in E. coli, yeast or insect cells. The protein is purified by chromatography. For example, the poly-histidine tag can be used to bind the expressed protein to a metal chelate column such as Ni2+ chelated on iminodiacetic acid agarose. The protein is then labeled with a fluorescent tag such as carboxytetramethylrhodamine or BODIPY® (Molecular Probes, Eugene, Oreg.). The protein is then exposed in solution to the potential ligand, and its diffusion rate is determined by FCS using instrumentation available from Carl Zeiss, Inc. (Thormwood, N.Y.). Ligand binding is determined by changes in the diffusion rate of the protein.

[0086] Surface-Enhanced Laser Desorption/Ionization (SELDI) was invented by Hutchens and Yip during the late 1980's (Hutchens and Yip (1993) Rapid Commun. Mass Spectrom. 7: 576-580). When coupled to a time-of-flight mass spectrometer (TOF), SELDI provides means to rapidly analyze molecules retained on a chip. It can be applied to ligand-protein interaction analysis by covalently binding the target protein on the chip and analyze by MS the small molecules that bind to this protein (Worrall et al. (1998) Anal. Biochem. 70: 750-756). In a typical experiment, the target to be analyzed is expressed as described for FCS. The purified protein is then used in the assay without further preparation. It is bound to the SELDI chip either by utilizing the poly-histidine tag or by other interaction such as ion exchange or hydrophobic interaction. The chip thus prepared is then exposed to the potential ligand via, for example, a delivery system able to pipet the ligands in a sequential manner (autosampler). The chip is then submitted to washes of increasing stringency, for example a series of washes with buffer solutions containing an increasing ionic strength. After each wash, the bound material is analyzed by submitting the chip to SELDI-TOF. Ligands that specifically bind the target will be identified by the stringency of the wash needed to elute them.

[0087] Biacore relies on changes in the refractive index at the surface layer upon binding of a ligand to a protein immobilized on the layer. In this system, a collection of small ligands is injected sequentially in a 2-5 microlitre cell with the immobilized protein. Binding is detected by surface plasmon resonance (SPR) by recording laser light refracting from the surface. In general, the refractive index change for a given change of mass concentration at the surface layer is practically the same for all proteins and peptides, allowing a single method to be applicable for any protein (Liedberg et al. (1983) Sensors Actuators 4: 299-304; Malmquist (1993) Nature 361: 186-187). In a typical experiment, the target to be analyzed is expressed as described for FCS. The purified protein is then used in the assay without further preparation. It is bound to the Biacore chip either by utilizing the poly-histidine tag or by other interaction such as ion exchange or hydrophobic interaction. The chip thus prepared is then exposed to the potential ligand via the delivery system incorporated in the instruments sold by Biacore (Uppsala, Sweden) to pipet the ligands in a sequential manner (autosampler). The SPR signal on the chip is recorded and changes in the refractive index indicate an interaction between the immobilized target and the ligand. Analysis of the signal kinetics on rate and off rate allows the discrimination between non-specific and specific interaction.

[0088] The compounds that are active in the methods disclosed herein may be used to combat agricultural pests such as aphids, locusts, spider mites, and boll weavils as well as such insect pests which attack stored grains and against immature stages of insects living on plant tissue. The compounds are also useful as a nematodicide for the control of agriculturally important soil nematodes and plant parasites.

[0089] VI. Production of peptides

[0090] Phage particles displaying diverse peptide libraries permits rapid library construction, affinity selection, amplification and selection of ligands directed against an essential protein (H. B. Lowman, Annu. Rev. Biophys. Biomol. Struct. 26, 401-424 (1997)). Structural analysis of these selectants can provide new information about ligand-target molecule interactions and then in the process also provide a novel molecule that can enable the development of new insecticides based upon these peptides as leads.

[0091] The invention will be further described by reference to the following detailed examples. These examples are provided for purposes of illustration only, and are not intended to be limiting unless otherwise specified.

### EXAMPLES

[0092] Standard recombinant DNA and molecular cloning techniques used here are well known in the art and are described by Sambrook, et al., Molecular Cloning, eds., Cold Spring Harbor Laboratory Press, Cold Spring Harbor, N.Y. (1989) and by T. J. Silhavy, M. L. Berman, and L. W. Enquist, Experiments with Gene Fusions, Cold Spring Harbor Laboratory, Cold Spring Harbor, N.Y. (1984) and by Ausubel, F. M. et al., Current Protocols in Molecular Biology, pub. by Greene Publishing Assoc. and Wiley-Interscience (1987). Well known Drosophila molecular genetics techniques can be found, for example, in Robert, D. B., Drosophila, A Practical Approach (IRL Press, Washington, DC, 1986).

### Example 1

[0093] Identification Of Larval Lethal Lines

[0094] Essential nucleotide sequences are identified through the isolation of lethal mutants defective in larval development. The genetic scheme for mobilization of P-lacW is as performed in Deak et. al, Genetics 147: 1697-1722 (1997). Additional larval lethal lines are identified and disclosed in Braun, A., B. Lemaitre, et al., Genetics 147: 623-634 (1997); Galloni, M. and B. A. Edgar, Development 126: 2365-2375 (1999); Gateff, E., Int. J. Dev. Biol. 38(4): 565-590 (1994); Mechler, B. M. J. Biosci., Bangalore 19(5): 537-556 (1994); Roch, F., F. Serras, et al., Mol. Gen. Genet. 257: 103-112 (1998); Russell, M. A., L. Ostafichuk, et al., Genome 41: 7-13 (1998); and in Torok, T., G. Tick, et al. Genetics 135: 71-80 (1993). Furthermore, the BDGP gene disruption project of single P-element insertions reveals larval lethal lines mutating 25% of vital Drosophila genes Spradling, A. C., D. Stern, et al., Genetics 153: 135-177 (1999).

[0095] Males carrying the transposase source P(Δ2-3) are crossed en masse to yellow white females homozygous for a P-lacW insertion on the X chromosome. Males carrying the PlacW insertion on the X and Δ2-3 on the third chromosome are collected from this cross. The F0 “jumpstart” males are crossed in groups of 10-15 to 20-25 females of w sp1; Sb/TM3, Ser genetype. Male F1 progeny with pigmented eyes indicate that the P-lacW has jumped to an autosome. An average of 10-15 males from each F0 cross lacking Δ2-3 are crossed individually to y w; DTS-4/TM3, Sb Ser females, that all third chromosomal insertions result in balanced F2 stocks. Insertions on other autosomes yield white-eyed flies in the F2 generation and are eliminated. The balanced third chromosome insertions are tested for lethality in the next generation by placing four to six pairs of y w; P-lacW/TM3, Sb Ser flies in a vial and examining their progeny for the presence of homozygous P-lacW flies. To analyze the lethal phase, the TM3, Sb Ser balancer is replaced by the TM6C, TB Sb chromosome. In such a genetic background, homozygous mutants can be identified by their wild-type body-length. An average of 10-15 pairs of flies are placed in vials supplemented with yeast paste, and the eggs are collected from each line for 1 day. The development of 50-100 progeny is monitored, and the presence of homozygotes are recorded in all developmental stages. Lethal phase is assigned to a developmental stage in which homozygote animals last appear. Larval lethal lines are identified and maintained.

### Example 2

[0096] Sequence Determination

[0097] Inverse PCR: To determine the flanking sequence of the larval lethal lines, the “Inverse PCR and Cycle Sequencing Protocol for Recovery of Sequences Flanking PZ, PlacW, and PEP elements” of E. Jay Rehm, Berkeley Drosophila Genome Project on the world wide web at fruitfly.org/methods/ is used with slight modifications. These modifications include the following: genomic DNA is obtained from 10 flies, rather than 30 flies, with adjustments for final concentrations; all DNA precipitations are performed using glycogen; for some reactions, all of the digest volume is used in the appropriate ligations; the number of cycles in PCR reactions was increased to 40; Pry1 and Pry2 were used to sequence the PEP line flanking sequences.

[0098] Genomic DNA isolation: Flies are collected and frozen at −20° C. until ready for use. Genomic DNA is prepared by grinding flies in 200 μl Buffer A with a disposable grinder 30× (Buffer A is composed of 100 mM Tris-Cl, pH7.5, 100 mM EDTA, 100 mM NaCl, 0.5% SDS). Add 200 μl additional Buffer A; grind another 15×. Keep on ice until finished. Incubate at 65° C. for 30 minutes. Vortex to mix. Add 800 μl freshly made LiCl/KAc Solution (LiCl/Kac Solution is comprised of 1 part 5 M KAc and 2.5 parts 6 M LiCl). Vortex. Incubate −20° C. for 20 minutes. Spin at maximum speed at room temperature 15+ minutes. Transfer 1 ml supernatant to a clean tube avoiding floating debris. Add 600 μl room temperature isopropanol to supernatant. Mix well by tipping. Add 0.5 μl glycogen. Vortex. Incubate at room temperature for 5 minutes. Spin 15 minutes at room temperature, maximum speed. Aspirate away the supernatant. Wash 2× with 500 μl 70% room temperature ethanol; vortex between washes. Spin for 10 minutes at room temperature, maximum speed. Aspirate away supernatant. Dry in a speed vacuum for 10 minutes. Resuspend in 50 μl TE+0.1 mg/ml RNAse A {for 1 ml TE/RNAse A Solution, add 990 μl TE+10 μl RNAse A (10 mg/ml)). Check 5 μl on 0.8% gel.

[0099] Digest Genomic DNA (Sau3A I, HinP1 I, or Msp I—done separately): Set up digests in 96 well tray. Per reaction, add 10 μl genomic DNA, 5 μl 10×Buffer, 2 μl 0.1 mg/ml RNAase A stock, 30.5 μl dH₂O, 10 units of enzyme (8 units for Sau 3A I), 0.5 μl of 100×BSA (for Sau 3AI only). Incubate at 37° C. for 2.5 hours. Check on 0.8% gel before heat-inactivating at 65° C. for 20 minutes.

[0100] Ligate P Element and Flanking DNA: Set-up ligation tube with 400 μl of ligation mixture then add 30-50 μl of the digest: Per reaction, add 30 μl of digested genomic DNA, 43 μl of 10×ligation buffer (NEB), 375 μl of dH₂O, and 2 μl of ligase (2 Weiss units). Incubate overnight at 4° C. Total reaction volume is adjusted as appropriate.

[0101] Precipitate Ligated DNA: To ligation tube, add 40 μl 3M NaAc pH5.2+1 ml 100% room temperature ethanol+1 μl glycogen. Mix by tipping. Incubate −20° C. for 15+ minutes. Spin 15 minutes, 4° C. Aspirate away supernatant. Wash with 500 μl room temperature 70% ethanol. Vortex. Spin room at temperature for 10 minutes. Aspirate away supernatant. Dry in speed vacuum for 10 minutes. Resuspend in 50 μl TE. Vortex to mix. Transfer to 96 well plate.

[0102] PCR: Set up PCR reactions in 96 well plates (Applied Biosystems). Set up PCR reactions with primers appropriate for the type of P element and the end of the element from which genomic sequence is to be recovered.

[0103] Primers for PCR: (type of P element 5′ or 3′ end forward primer reverse primer annealing temperature):

| | |
|---|---|
| PZ P-element5′endPlac4Plac1 | 60° |
| PZ P-element3′endPry4Pry1 | 55° |
| PZ P-element3′endPry2Pry1 | 60° |
| PlacW P-element5′endPlac4Plac1 | 60° |
| PlacW P-element3′endPry4Plw3-1 | 55° |
| PlacW P-element3′endPry2Pry1 | 60° |
| PEP P-element5′endPwht1Plac1 | 60° |
| PEP P-element3′endPry4Pry1 | 55° |
| PEP P-element3′endPry2Pry1 | 60° |

[0104] The Pry2/Pry1 combination has a higher annealing temperature than the Pry4/Pry1 and Pry4/Plw3-1 combinations, but the resulting PCR products do not allow sequencing directly off the 3′ end of the P-element. The latter primer combinations are therefore used in all initial experiments; the Pry2/Pry1 combination can be used in those cases where strong and unique bands do not result.

[0105] Per reaction: 10 μl of ligated genomic DNA, 1 μl of 10 mM dNTP mix, 1 μl of 10 μM forward primer stock, 1 μl of 10 μM reverse primer stock, 5 μl of 10×Qiagen Taq buffer, 31.5 μl of dH₂O, 0.5 μl of Qiagen Taq.

[0106] Cycles: 1×95° C. for 5 minutes; 40×(95° C. for 30 seconds; 60° C. (high temp) or 55° C. (low temp) for 30 seconds; 68° C. for 2 minutes); 1×72° C. for 10 minutes; hold at 4° C.; run 10μl on 1.5% gel to check. Rearray positive wells to 96 well plate for sequencing clean-up. The primer sets for PCR are as shown in the table below:

| Digest, End, Temperature | Forward PCR Primer | Reverse PCR Primer |
|---|---|---|
| H5h | Plac4 | Plac1 |
| H3h | Pry2 | Pry1 |
| H31 | Pry4 | Plw3-1 |
| M5h | Plac4 | Plac1 |
| M3h | Pry2 | Pry1 |
| M31 | Pry4 | Plw3-1 |
| S5h | Plac4 | Plac1 |
| S3h | Pry2 | Pry1 |
| S31 | Pry4 | Plw3-1 |

[0107]

| | | |
|---|---|---|
| Plac4 (27) | - act gtg cgt tag gtc ctg ttc att gtt | SEQ ID NO:1 |
| Plac1 (24) | - cac cca agg ctc tgc tcc cac aat | SEQ ID NO:2 |
| Pry4 (23) | - caa tca tat cgc tgt ctc act ca | SEQ ID NO:3 |
| Pry1 (26) | - cct tag cat gtc cgt ggg gtt tga at | SEQ ID NO:4 |
| Pry2 (28) | - ctt gcc gac ggg acc acc tta tgt tat t | SEQ ID NO:5 |
| Plw3-1 (19) | - tgt cgg cgt cat caa ctc c | SEQ ID NO:6 |
| Pwht1 (19) | - gta acg cta atc act ccg aac agg tca ca | SEQ ID NO:7 |

[0108] Enzymatic Clean-Up for Sequencing: To 40 μl PCR reaction, add 4 μl of enzyme mix. Incubate at 37° C. for 1 hour. Inactivate at 70° C. for 10 minutes. (Enzyme Mix consists of 2.5U/μl Exonuclease I (Amersham E700732), 0.5U/μl Shrimp Alkaline Phosphatase (Amersham E70183), 1×Amplitaq PCR buffer, add dH₂0 to final volume.)

### Example 3

[0109] Sequence Analysis

[0110] Sequence of the flanking sequence generated by inverse PCR is performed on an ABI 3700 sequencer (Perkin Elmer) using BIG DYE sequencing reaction.

[0111] Primer sets for sequencing are as shown in the table below:

| Digest, End, Temperature | Forward Primer | Reverse Primer |
|---|---|---|
| H5h | Splac2 | Sp1 |
| H3h | Pry2 | Sp5 |
| H31 | Spep1 | Sp5 |
| M5h | Splac2 | Sp1 |
| M3h | Pry2 | Sp5 |
| M31 | Spep1 | Sp5 |
| S5h | Splac2 | Sp1 |
| S3h | Pry2 | Sp6 |
| S31 | Spep1 | Sp6 |

[0112] The following primer sets are designed to sequence both ends of PCR products recovered from PlacW and PZ strains:

[0113] Splac2 and Sp1—for use with the Plac4/Plac1 5′ PCR primer combination with either PZ or PlacW P-elements; allows sequencing of both ends of the PCR fragment.

[0114] Spep1 and Sp3—for use with the Pry4/Pry1 3′ PCR primer combination with PZ P-elements; allows sequencing of both ends of the PCR fragment.

[0115] Spep1 and Sp6—for use with the Pry4/Plw3-1 3′ PCR primer combination with PlacW P-elements where Sau3a digestion is performed; allows sequencing of both ends of the PCR fragment.

[0116] Spep1 and Sp5—for use with the Pry4/Plw3-1 3′ PCR primer combination where HinP1 digestion is performed; allows sequencing of both ends of the PCR fragment.

[0117] Pry1 and Pry2—for use with the Pry1/Pry2 3′ PCR primer combination; allows sequencing of both ends of the PCR fragment.

[0118] The PCR products recovered from PEP strains are sequenced with the following primers: Sp1—for use with the Pwht1/Plac1 5′ PCR primer combination with the PEP element; Spep1—for use with the Pry4/Pry1 3′ PCR primer combination with the PEP element; Pry1 and Pry2 for use with the Pry1/Pry2 3′ PCR primer combination with the PEP element.

[0119] Primer Sequences (5′ to 3′):

[0120] Splac2 (25)-gaa ttc act ggc cgt cgt ttt aca a SEQ ID NO:8

[0121] Sp1 (22)-aca caa cct ttc ctc tca aca a SEQ ID NO:9

[0122] Sp3 (24)-gag tac gca aag ctt taa cta tgt SEQ ID NO:10

| | | |
|---|---|---|
| Sp6 (23) | - tga cca cat cca aac atc ctc tt | SEQ ID NO: 11 |
| Sp5 (25) | - gca tca caa aaa tcg acg ctc aag t | SEQ ID NO:12 |
| Spep1 (19) | - gac act cag aat act att c | SEQ ID NO:13 |

[0123] Melting temperatures of sequencing primers:

[0124] Splac2-60.1° C.

[0125] Sp1-50.6° C.

[0126] Sp3-49.3° C.

[0127] Sp6-54.9° C.

[0128] Sp5-60.3° C.

[0129] Spep1-44.8° C.

### Example 4

[0130] Secondary Confirmation of Lethality

[0131] The lethality of the chromosome carrying the P-element insertion is demonstrated genetically as described in Example 1. The essential Drosophila nucleotide sequences are identified by isolating nucleotide sequences flanking the P-element insertion and aligning those sequences with genomic Drosophila sequence obtained from the Celera Drosophila database. However, in some instances, a second site mutation exists on the chromosome that is responsible for the lethality. In other instances, the location of the flanking sequence is such that determination of which gene(s) are affected by the P-element insertion is rendered difficult or impossible. Thus, to provide secondary confirmation that the gene indicated is essential, there are many methods that one skilled in the art can use, e.g., rescue of the lethality using transformation technology, perturbation of the gene in a targeted manner, or failure to complement a deficiency.

[0132] To provide secondary confirmation, larval lethal lines are crossed to a line containing a deficiency spanning the region of the insert. This creates a hemizygous condition in that particular region and reveals the recessive phenotype of the P-element. Complementation with deficiencies that unequivocally remove the P-element insertion site is taken as proof that the P-element does not cause the associated phenotype. Failure to complement indicates that the strain is verified. This method is as performed in Spradling, A. C., D. Stern, et al., Genetics 153: 135-177 (1999). While lines with secondary mutations closely linked to the P insertion might be erroneously verified by this procedure, further molecular and genetic analyses suggest that the frequency of such errors is small. RNA interference, described in Fire, A., S. Xu, et al., Nature 391, 806-811 (1998) and Kennerdell, J. R. and Carthew, R. W., Cell 95, 1017-1026 (1998), is used as a method to target a gene of interest and demonstrate that the perturbation of the identified gene produces a lethal phenotype.

### Example 5

[0133] Isolation Of Full Length cDNA

[0134] A cDNA screen is performed using a Drosophila melanogaster cDNA library probed with a portion of each nucleotide sequence disclosed in the Sequence Listing. Positive colonies are selected, a subset sequenced, and a clone corresponding to the full-length cDNA is recovered. Alternatively, primers from the predicted 5′ and 3′ end are used in polymerase chain reaction with either a Drosophila cDNA library or first strand cDNAs obtained by reverse transcription of Drosophila mRNAs as template to amplify a fragment representing the full-length clone.

### Example 6

[0135] Expression Of Recombinant Protein In Insect Cells

[0136] Baculovirus vectors, which are derived from the genome of AcNPV virus, are designed to provide high levels of expression of cDNA in the SF9 line of insect cells (ATCC CRL#1711). Recombinant baculovirus expressing the cDNA of the present invention is produced by the following standard methods (InVitrogen MaxBac Manual): cDNA constructs are ligated into the polyhedrin gene in a variety of baclovirus transfer vectors, including the pAC360 and the BleBAc vector (InVitrogen). Recombinant baculoviruses are generated by homologous recombination following co-transfection of the baculovirus transfer vector and linearized AcNPV genomic DNA (Kitts, P. A., Nucleic Acid. Res. 18: 5667 (1990)) into SF9 cells. Recombinant pAC360 viruses are identified by the absence of inclusion bodies in infected cells and recombinant pBlueBac viruses are identified on the basis of B-galactosidase expression (Summers, M. D. and Smith, G. E., Texas Agriculture Exp. Station Bulletin No. 1555). Following plaque purification, the Drosophila cDNA expression is measured.

[0137] The cDNA encoding the entire open reading frame for the Drosophila cDNA is inserted into the BamHI site of pBlueBacII. Constucts in the positive orientation, which are identified by sequence analysis, are used to transfect SF9 cells in the presence of linear AcNPV wild type DNA. Authentic, active Drosophila cDNA is found in the cytoplasm of infected cells. Active Drosophila cDNA is extracted from infected cells by hypotonic or detergent lysis.

### Example 7

[0138] Expression Of Recombinant Protein In E. coli

[0139] A cDNA clone of the present invention is subcloned into an appropriate expression vector and transformed into E. coli using the manufacturer's conditions. Specific examples include plasmids such as pBluescript (Stratagene, La Jolla, Calif.), pFLAG (International Biotechnologies, Inc., New Haven, Conn.), and pTrcHis (Invitrogen, La Jolla, Calif.). E. coli is cultured, and expression of the recombinant protein is confirmed. Recombinant protein is then isolated using standard techniques.

### Example 8

[0140] In vitro Binding Assays

[0141] Recombinant protein is obtained, for example according to Example 6 or Example 7. The protein is immobilized on chips appropriate for ligand binding assays. The protein immobilized on the chip is exposed to sample compound in solution according to methods well know in the art. While the sample compound is in contact with the immobilized protein measurements capable of detecting protein-ligand interactions are conducted. Examples of such measurements are SEDLI, biacore and FCS, described above. Compounds found to bind the protein are readily discovered in this fashion and are subjected to further characterization.

[0142] The above disclosed embodiments are illustrative. This disclosure of the invention will place one skilled in the art in possession of many variations of the invention. All such obvious and foreseeable variations are intended to be encompassed by the appended claims.

The application's sequence listing, which the Patent Office published only in electronic form, follows.

SEQUENCE LISTING (361 sequences)

SEQ ID NO: 1 - DNA, 27 bp, Artificial Sequence
  Description of Artificial Sequence: PCR Primer Sequence Plac4
actgtgcgttaggtcctgttcattgtt

SEQ ID NO: 2 - DNA, 24 bp, Artificial Sequence
  Description of Artificial Sequence:  PCR Primer Sequence Plac1
cacccaaggctctgctcccacaat

SEQ ID NO: 3 - DNA, 23 bp, Artificial Sequence
  Description of Artificial Sequence: PCR Primer Sequence Pry4
caatcatatcgctgtctcactca

SEQ ID NO: 4 - DNA, 26 bp, Artificial Sequence
  Description of Artificial Sequence:  PCR Primer Sequence Pry1
ccttagcatgtccgtggggtttgaat

SEQ ID NO: 5 - DNA, 28 bp, Artificial Sequence
  Description of Artificial Sequence: PCR Primer Sequence Pry2
cttgccgacgggaccaccttatgttatt

SEQ ID NO: 6 - DNA, 19 bp, Artificial Sequence
  Description of Artificial Sequence: PCR Primer Sequence Plw3-1
tgtcggcgtcatcaactcc

SEQ ID NO: 7 - DNA, 29 bp, Artificial Sequence
  Description of Artificial Sequence:  PCR Primer Sequence Pwht1
gtaacgctaatcactccgaacaggtcaca

SEQ ID NO: 8 - DNA, 25 bp, Artificial Sequence
  Description of Artificial Sequence: PCR Primer Sequence Splac2
gaattcactggccgtcgttttacaa

SEQ ID NO: 9 - DNA, 22 bp, Artificial Sequence
  Description of Artificial Sequence:  PCR Primer Sequence Sp1
acacaacctttcctctcaacaa

SEQ ID NO: 10 - DNA, 24 bp, Artificial Sequence
  Description of Artificial Sequence: PCR Primer Sequence Sp3
gagtacgcaaagctttaactatgt

SEQ ID NO: 11 - DNA, 23 bp, Artificial Sequence
  Description of Artificial Sequence: PCR Primer Sequence Sp6
tgaccacatccaaacatcctctt

SEQ ID NO: 12 - DNA, 25 bp, Artificial Sequence
  Description of Artificial Sequence: PCR Primer Sequence Sp5
gcatcacaaaaatcgacgctcaagt

SEQ ID NO: 13 - DNA, 19 bp, Artificial Sequence
  Description of Artificial Sequence: PCR Primer Sequence Spep1
gacactcagaatactattc

SEQ ID NO: 14 - DNA, 1014 bp, Drosophila melanogaster
agcgaacgcagaacgcgccagaccaaaaagttcagattcgagagcggatatcccggcgagcgttcacggaaatatatttgtttgttattcgagtccagcaacgaatatttaaataaacaaaaaacgaactttattcgtgtgcggagagagaagtcaaaagatccaataaaatgggttgcgccacgaccagcgtgaagatcgcctccatcgttctgaatgccgttttagggtttcttgctgctggggccatcggctggatagcttacaatgcggacacggagacggaggaattcgtaatagccgcttacatcgcgtgctcgctcatcctggtctttgctctgctgggcatcttcgcggccatccgggaatcggtggtgctgactgcaacgagtgctgtcttcctgctgatcttggccatcctgcagatcgtgagcacctgcctgttcctccacgagttcgacgtgaagagcggccgggacatggtggaggtggcctggcaggcgaacaacatggattccttgcagcagaagcacgagtgctgcggccagagcagcgcccaggactatatccacctcagcctgctgatcccgcccagctgctacgcggatctgcagcagacccccgaccacctctatctggacgggtgcatcgaaaaggtgcagagcttctacgaaagcgacaagctgcgcttcatcatagtgtcctgggtgctagtggccttcgagttaatctgcttcgccttggccgtgtttctggccattagttttaagaacaagcagcgacggatggagttctagttctaggcttcggtaatctcgagctatccaacagtacaaactcggaatcggggtctcgctgatatttttctcttcaacatttcataaccaaatgcaaaggacagtcataaattattcactcctaccttaatgtaacctgtaattaaagtacatatttgtagttcaattacccattataagtatcataataaatgtgcgcgtgtttgttttcacatga

SEQ ID NO: 15 - protein, 208 aa, Drosophila melanogaster
MGCATTSVKIASIVLNAVLGFLAAGAIGWIAYNADTETEEFVIAAYIACSLILVFALLGIFAAIRESVVLTATSAVFLLILAILQIVSTCLFLHEFDVKSGRDMVEVAWQANNMDSLQQKHECCGQSSAQDYIHLSLLIPPSCYADLQQTPDHLYLDGCIEKVQSFYESDKLRFIIVSWVLVAFELICFALAVFLAISFKNKQRRMEF

SEQ ID NO: 16 - DNA, 2195 bp, Drosophila melanogaster
tacctcttcagcaaagggtattgtgggaccttcatgccggatgaccagtggacgtaagagtaacaccattcactttttctacgcgtaaaggggtaaggtctcgaaagggtaaaagggctcggactgggtttacccttagaacgtgttgtgggccactacgctcgttactcggttttagctttttagttataacgcgggttcaagtgtagaaagcgttctctcgtttttaaccactgttactcggcgatttctgatatttgtttagctacgttagagttttttataaatatttacgtattatggacaagtgtatgaatgtattaaggcggccggtcgacaaacattaaaaacgttatagatatttaccgggcgttaagacccaccgaatgcggttaatttaagtgataatataatatattaaataagaatatgttaatacgtgtaccctgtgacaaatgtttacagtctctaactaattcgtactttcgtattttacaagaacgtaaacgtacgatatcagagtatctaaaagtaaaaccacgaatcgttcatgtttacggtttacggattacgagtaaaatggtatcaaatcttttgatcaactacctatcgaccattacagactgacggtttacattcaacttttttactgcgacatctgcgattacttagcacgaacataaataaataaaccgtggggtcgtgatgtgcacgttaaataataaatttcacgaacagcgccgtaattttataataatccagtcatgttttacatataaatctgaaacttcgaccgactagttgctaaattattcattgaaagtggataatttttattatttgggattttgataatgcggaatagccatccacaatttattattacgtaaggtatatcgatcaaggacttcaagtatgcgtgttggaaccgttcattaaataattcaataaccccggtgtgaaaatcaaaatcaaagattgagacgctctttctacaagcaagttcttctttatctaatccttcattaaatcaggtattaaaaggaatcatgattcctgaattgattgataaaacaaagggaaagcaagtctgcacgttgcacaagaagaagaggacaccgcactggtggaccccaagccggcagaggcagatgccgtcgatacccagccgtgaaacgcctcctcgtcaaaagcctcagcggaaggacccgtacatgcaccggaacttccacagcatgttcataaggtatatgcactcatttgacgcaagtgttgacgttcagtgtctgattggagaaacgtaagtcatggattaaacgtcaccggaccaatatcggcgggacccgaggatggagaagtggaagtgccgctacgccctcgtcgactacccgtccaagctcctcgcgtacgcgctggagaagctcgctttctgggtgtcgctgctgttctacgtcggtcacgtgtcggagaagccgacgacgccgtaactccctggcgtcctgatggaagtcctcctcgtgccgcgggacgggtcgtcgacgacgatgcggaagctgacgaggttcggccgcgtgcagatgctcctccctacgaggtggttccgccatcgatgagactcttacgtccgcctcgagttgatgatgtcgacgtaccgctagtaacgggagctccactctgtaatttggtatgcgtcccattttaagtgaacggtgttcccatgaactcgtgttcccatacaaagccgtgcagcgaataccttctcaataggttattgaaaacttaattgcgtgtgttgactgagtcacttgtgtaaaattgatgaaaaaataagcagtgcgaatttatctttagggacggttctattctacacacaaaaaagtaagtttggtaaaaacaatgatttcaaaagaaatttgatttatacagtttccacgctagcaatgataaatacatgtgtcaacaactcgaaaacgaactacaatatttcaatatttcatcattcctgcaattctgtcattttataaaaaaattgtttcaagcgaacagataagctaaagctaaggtatagttataatataataatgttaaatacataaaaagtcaaaaacccgaacaagtggcgaatggtaaacccgttccgagcgttcatacggttttggttctatttcctgctcctctgggggtagttgctgact

SEQ ID NO: 17 - protein, 227 aa, Drosophila melanogaster
MEKSFPITPWKYGLLVTCILIVTCNVFFFSCGVTTWGSAVSVYGSYGSALCGGAVFGVAFLGMYVALKVSYKYSIYYLICSGLVIAALGSYLFTFTAMREQLMGRFEERMRDLFERKTHSDDKMQPVHSLFGCCGIEGPQDYLQEEHGALPSSCCYAFDCSKPAHVYEEGCSTKAVATLRMQAELNYYSCMAIIALEFLGLFTAYHLGKARKYAKTKIKDEETPIND

SEQ ID NO: 18 - DNA, 981 bp, Drosophila melanogaster
atggcgccacccgaaaatgggatccttgaggtcctcgaaaatctacttgaccggtacaaaatcaacctgctgcaaatgatgttcggcaccttcatcgccacgatcgtgttctttggcggactgatgactttcgtggagaagtacctgcccaatagcatacgccagtcctttcggtatggcaagcacagtttcaagggtgaaacggatcctttggtggcctggctggaggttccgaagtcctggttcaagcacttctacacatttgccctgttctggagctggctggcattttatgtgctcgtttcaaccgttcgggagcaaaaggaggcgcccgaatatgtactccaattcctggacatcatgggcggcggacgtagtcaccggaaggtggagatcgactcaacgactgcctgtgtgggcgcatttatgctcacgttgcagtgcacccggcgtttttacgagaccaattttgtgcaaatcttctccaagaagagcaaaatcaatctgtcgcactatgccgtgggctatgtgcactactttggagccgttatagctttactatccaatacctccggctttgtgcgcggctccaagcccatggagttcagcctcgacaagctgacaagccagcaaatactctacctcggcgtcttctttctcgcctggcagcagcagtatgccagtaacatgatattagttaacctgcggaaggatccgcggacgggaagtgtcaaaacggaaaagcaccttctgcccaagggtgggcttttcaatctgctttcgtcgccgcacatgttcctcgaggtggtcatgtacttctgcatcgccgatctctacatgccagttaggatttggcgattgatcttcctctgggtggccagcaatcaaacgatcaatgctctgctaacccacaagtggtaccaggaaacattcagggaatatccaaagaaccgacgtgctatcattccgttcctgctctga

SEQ ID NO: 19 - protein, 326 aa, Drosophila melanogaster
MAPPENGILEVLENLLDRYKINLLQMMFGTFIATIVFFGGLMTFVEKYLPNSIRQSFRYGKHSFKGETDPLVAWLEVPKSWFKHFYTFALFWSWLAFYVLVSTVREQKEAPEYVLQFLDIMGGGRSHRKVEIDSTTACVGAFMLTLQCTRRFYETNFVQIFSKKSKINLSHYAVGYVHYFGAVIALLSNTSGFVRGSKPMEFSLDKLTSQQILYLGVFFLAWQQQYASNMILVNLRKDPRTGSVKTEKHLLPKGGLFNLLSSPHMFLEVVMYFCIADLYMPVRIWRLIFLWVASNQTINALLTHKWYQETFREYPKNRRAIIPFLL

SEQ ID NO: 20 - DNA, 1623 bp, Drosophila melanogaster
atgaagtttttaaacttaatagtggtcgtattagctttaatctgcaacgaagttcagggtctaaagttgcaggcaaatgttggagaactcttcacctacaaaatcgaaccgcaactctttaactggacacaccaggtgatcagccagcaatttcgctacagaccctcgctgaagaattatcccgatttgcccagttggatgcgatatatgtatagccatgaataccatgccggcttcctctacggaactcctccagcatcgtcggctggcaaggatctaagtctggatgtggtcgcccttaatcgccagaattacgaaacgcgacgcgttgtggtcacaatgtttgtcgcccacaagtttcccacacccaatgtcgtgcagatgaaaataaacaatctgaattgggtgcacctaatggatcccggcagaagggagaacctacgaaatatattccgcaacgatctttggccaaatagcaaggaggacttgagtgtggtcttcatggagtcagctgtgaatatgggcggacgacttccactgcgaccgcagcagcgcgaggggtaatctagttataatttagttatccataacaatctcttatcttattatattcatttcatatttcattgcagagtcattgtccacgtgggcagctttgcccagttctcaccgcggctgcaggaactccaggaggaagtgagaccactgtacaagttgccatcttgcacctacaaacgcacatccgtgcagaaaatctttgagaatgttggcttcaaactggactggtgcgcctttcgaatggtgggcatggaatcaccaacggaaatcctcttccacagtggcaagcagaacgagcagcagatgcccgatgatctgaatcagaggcaagaggatcgctggatgggaatcgccagggaggatgtgcccgaacgcaattacatcgatgaattcgcctttgcctttgccattccgggcatgatttttgccattttaatcggaatgctatcagctgttttgtgtttccagcacgagaagttgtgagtttcccaactgggaaattacgaaattgatttcttcattttatattttctttaattgtttttatctttcgtttacttcagttacgatccgcattctgagtttttctttgccaacattttccacatctgcgaagagtcctgtgcgccgcaaagcgcgtcaagcgattctggtgcggatgatggttctgagaggtgatttcacttcttattttcctatttgctcattgaaagcagtgattgtatatgattggtatcgcttacagctcttccaattcggattatcccatggcatccactgtgcagatggttcagtgttcggatagcaaatccaatcagcccataacaacattgaaaagcctcaaggatcccaattttctactggacaacactagcatgagatctcagaggtggagctgtctagctattcatattcagaactctcatattcaaatatctatttatctattgtagtcccaacaacagcttttaccagttggactgcggaaactccagcatttatgctcgtcccaagccaccgccatataagggcggtactttgggtcgaaatggagtggacatttga

SEQ ID NO: 21 - protein, 326 aa, Drosophila melanogaster
MWTCLCQLCFYLLSTLAVAALSIAALVLYKTKPYPNIKRHKDEETFLDPHTIKTVTFPSLEDSPSLELSVIVPAYNEEQRLPSMLDECLAFLEQKSAGTPNFTYEVIVVSDGSQDATVSVALGYSKKHGAEKVRVLELIENRGKGGAVRMGMLSARGRNLLFADADGATKFPDYDKLEVALKQLAPEWRDDGIAIGSRAHLENDAIATRSFFRTILMHGFHFLVWLFAVRSIRDTQCGFKLFTRTTARKLFTSLHVERWAFDVELLYLAENLKLPMSEVAVRWTEIDGSKLTPFWSWLQMGRDLFMIWVRYLVGAWRIASIQKKEK

SEQ ID NO: 22 - DNA, 583 bp, Drosophila melanogaster
gatctttgaagcgtgttcatacgcttcaggagccctgtgatacggttgttacggaggcaactccaccagtcgtacttgatgtatggaaagccactcttcagttagtcataaacgcacttcgaaatggtctggtgccggtggctcctaagccaacacgtcctcgtctaagacgtactgtagcagttccgagacgcgtgcggcgaccgctacttcatgtttacggaaaggaggtcgtgtaccttcgaccggtaaaggtcagactaatcgcacgacgtatgaccagagttccaccgcgctcgattcggcgttgtaaagcgttcgaacaccctgctaaaccggctatgggacctgttcaaggacaaaggccgctcacacacgtggtagctcctagcgccagagctcctctagcacgacctactttgctagctaacagtccaataactcgacgactccctgctccacaacggagtgagcgtgctttacggtgtggtcaaatagtacgtctagcatcacgacgacttgttccctagatatgtgaggcggagtctgtgcttgtaaacgatgcttaggctgaccttcgacg

SEQ ID NO: 23 - protein, 194 aa, Drosophila melanogaster
LETSHKYAKSSGHYANNASVEVVSMNYIPFGEKSISICVKLYQTTATEDSVVQEQILHDIVKALRTPLAMKYKCLSSSTWKLAISSLISVLHTGLKVARAKPQHFASLWDDLADTLDKFLFPASVCTIEDRGLEEIVLDETIDCQVIELLRDEVLPHSHEMPHQFIMQIVVLLNKGSIHSASDTNICYESDWKL

SEQ ID NO: 24 - DNA, 12758 bp, Drosophila melanogaster
atgatgatgatggacaccatggacacctcgcaatcgcagccgatggacgtggctccggccgtagcagtggcagccacttcgggcgcagctctggtggactttaccgctgccatggtgagcatggcggccaccgccgaggctgagtccgccgagagcaacaacaaccacatcgacatggccgagtacaaggagcaccgcaagaacaaaaaaaagaaacgcgagaagcgggagcgcgagggcaaggagcaccggcatcacaaacaccgtgaccgggagcatcgcgagcatcgacgacatcgcgaccgggatcgggacaaggagcgggatcgggagggacatcaccaccatccaacgcaccaccaccccaacaacagccagcactcgacctccgcctcgtcgtcgccttcgtctgcctctaccacgccctcggcgaccatcgaatacgtgggcggatcggcttccgcctcgccctcttatctgggtggtggagcgacagggacgggtgcagccgtaggagccaccaccacatatccgcacaacttaaaaatacgcttcctgctttccggggtaagaatttgactttgcctcggtccgccccccccccccaccccccgcctgccatcgaaaaacacggcgccaagcatatccgtgcatccaagcatctgtccctgccaatccctcgaatctattttcggagcttcatggaggctgtctggtctgtcaactaggaaatggttgcaaacagaagcagatctaaaagagaaattatttccattttagcgagtcttctcgaaacgatgatcccatatggtgataaatatgtattttgattcgttgctgtggcaggtgctgttaattcaaattatcaatgatccttgaattccaagtaaaaattttattggtgctaggttgtaggaactgatttgttatctcgctgagaatggcaagataggctgcaacatttcggaaatttaacacattcaaaggtcgttttcgagcacaaaaaaatagaatctcttctgtttttcatttcggacaaaagcatgcttttacaatgaacacattttcaggtaaaacattcaagcgaattaattggaaaaaatagtttgacatcagtattctcagttcgctcaatcacttcttgtttttaagtattaaccgcaaaccttgggacataagaatttttccaaatgtgatatttgatctcaaccctttcattttcgcttagaaactgatccgttttttatttgtcccttttctttttctcatactcatatctcccaacgtgagtgatcgccgtttgtttcccatgatgccccgggatactgatccaaccattagggcctcttatttaaattccaaccatcgggaatgcgttatatttatttaatggatcctttattttaaaacaacccccattgcgtcgctgttcgattgccaatgtctttgacactccatcaataatttaaacgaattttcaccgtgcagtgcacaatgtgcaacatgcacctgcaactgtgggactgagccacctgccccgaatgctggaaaacaaaaggagcgatgagagggaagacaccttcaattacgccgggctccgcccctcgcccgcatccactttccctgcgccgtccttccactccaattggccttaaaacgcatatatcagagttgtgacacatggtgctcgattattgattagtgtaagtgccattaagggcggactctactcctgctagtcctcctccttctcctgcttcctgctgccttatccaggactacgtgaccgaccagcagaggggattccgggcagacagctgtttgccttatccttgccgtttccccttcagagggcaaaaacttatcccgaaaacaggccggcttcgctggctgcctgggcatatccctgggatatcgcattgtatcctggccggggtcgtttccttcttctggccttgtacaatacagacagtcagcatggcacatttgcgcctagtttacgacagctgccaagcatcttcctcgctccctcgtggctacatcttgagctcgttcctcggatctacccttacgttttggtgcctgtgtgcttgctgttgtttcctggcggctgattgatcctcgcttcgatcttgttacagctgccgattcttagatcccaggtatgcgggcctgggatctgtattaactcacctttccttactgctgtcatcttgttgtttttcgcttgtcccaacttttgctctaattgttattttaattggtaagcgcgtcatggtttttcgttcagtggtagattaaactgtaaagaaaacatttttataagcactgctttcctgggattccctttaatatttatttattccgagcactttaaaaacattgtcccatccagggatactttaaaatttgcttagcaattctacaaaaccacttgtacgtgtcctatttcttatccaaacatcatacttcgagttttctgtgtgggatttcctttcctatttatatgaagatgcacggattcacttattttataataaaggacttttgtacaacattttagattggttcggggccttttcttggcgtataatactttgaggacttaagcttattatattcctgaggcttctaggcttctaggcaaatacaaatagatggggcttagttaatttaatttatgaaccctctagttcatctgttaagtcctttgcaatcatccagaaggcacttaccgaaatcctatccatatattccctttgatcgcccaattatcccctagataagtagaaagttgtagtttcccctttgctagacattccgtttcccacttaaggccttaattcaataagggatatacataccagacgttttgtttatttgttgaaatctgagcaattttgcttgattttgctttctaccagcaacgactacgtttcattaggcatttacaaaaaaataccgctttattcaatttgaataattctatcgtttatttggcgacttgcttgttgtttacttggatattttcgtcgcttatgcgaattctttccgcaaaggggacaaggacaacccttttatgcgaccattaacccacagcattgtttgccagaaagagacggtaaatcgcgaaggggtaggagtgagaaagcagtcattcgagcgcagacacgctaatataatatttatagttggtgttttgcttccggctgcctgagcttagctgggctccttttattgaattgaatttgtcgcacaatgggaataaaattgaaatgtgtccaggaagcgatttccgaatgcaaagcacgctcaagttgtcgaaaaaaatatgtctgtatagcataggggttgcttcgctatcctgattcagctccgacttcaggccattagctgcagcaacaggataatcacgattgcggcagctggctagcaggagaatcacaaaaaaaagccgagggttagaaaacaattcgaaaagcttgggatgagtacagaacttgaccatgaaaaaggatgaactcgattctcaattacaaaacatttcgcatttaaaactttggcttacagtagaacttaacaaacttttaaactgtattgaaatactgtgtgcccattaaaagtatattatttttaattttatgtttgacaaaatactacacttttcataaacaccttttgattgtaactcgatgtttggccggttcttccttttcttgacctgaatctaatgaggcatgaaggtgtttttgtcggttttggaaatttgaaaccggagtttttgagagcaacaggcatgcgccgccacctcgttgttgagagatcccaattaaacgggatttcctattgggaaaaccacccatcaggtggcaacgccgttcgttcatgggcttttctttattgtctctttttgtctacgtgaccaaacttcattgcatgtggatgtgtgtgtgtgtgtgtgtgtgtgtgtgtgtgtgttatgttgcacccccaaccccgatattaaagagcaacaacaatagagaggaagtctgatgacacaacgaaagcggagggagacggagaagtagctattgggagagagagagagtgagtggagtgtgagagggggtgggcgaaatcaaaatgagcggagttgtagttactctctcggtaggccatgctctttattgttttttttgtacattcggtgcatgtaacatttgttgccccacacaaaccgacgtataaatatacatatagtatataattcagctgcatatggcagcatatgtcgaggcaaaaccacaaaagtaaaaacggtacaacagcaagaacaacgtgaaaaactcgcccagcattgcagcaacatttgttgcagctgcagcctggatgtcttggattcctttcaaaactctgactcacttacttgttccgttcgttttttttttaaatatatatttctcctttttttttgggtgtgcagcaacatcagcgataagagcttgtgagttgcattactgtggcagtctttttatctatatggaacacatatgtatgtaggttgtgaatgcagccttctctttctgtcatccacccgcatgcatcatttgcagcaacaacaatggcttgctgtgattgctggttcagctcaacagttaacagcctgttatgggcctgttaatcaagctgtgctctctggtgctttccagttccagtgtcttctgcgattgttattcttcgatggtgttgtaaacatgtgtttacatggctcaccaccaaccggatgttgctaatgaccgcaaagctaaaaagcaaatcgaccaaggaacgaacaccattatttacaccgatatggattcccctttgggaaacttttgataaagttttgacgaatgatttttgaaacattctgtgagggtatcatttaaatgattgaaatatagatatcggatttttttagtagagaaatattgcaacaagtgaatggacatttctttgagaattagactttaagatcgatttttcctataaacttttcccgtgctcttatccaaatgtctggcagctagatatttggtacaaatcaaatataaatattaaagatgatgaaaaattaaaaatttaattaattaaaaattaaaaagatgttttaaaatatgtgatagcaaataataatgtcgtcgcttaagaggatctataattatatattacatttctcattaacattatcgcaaagcccatgcagggaaataccaactaaaacatttttatttgcgtcataagtacttgtcgtgagcaagctttaaagttttcaaatatttgtaatcagagaacggaagtttctgatgcaaaaccataacaaccctcaactgtttcataaagtccccctttcgtcgtgtattacgaaacacaaatagggctaacaaattcttggttgtcatattcgcagaccttatcgtatagttagtagtatgggtttttatcagttagttttatttgcttctgaatcacaatccacgcattcacatactaatttaccacttcctgtcttcttttcgcctgcagcaacgtaccgaactcagcccgccgacccaccaaacatccgcaaccgccgaagtaaatgcaccgctggccagctcgacgagtgcatccattgcggtaactgcgagtgcgacggcggcatcagcccctccagcaacgggcaccactaccttaggcagcagcattagcggcaatgctggctcaacctccagcggtaacagttccggagtatcggcgactggaggagcacaatccgccgtggggtctggcggctatccaaagacagaatcgagcaagtcgagtggcaccgcaagcgcaggcagtggcagtggcagcagcagcaatacaagtagcaccaagcacggcagcaacatcaaggatattagcagcagtagcaatcagcaggcatcgactgcgagcagcagtagtgcacccagcctttatgtctccgtgccactgtccacggccaacgtacctggaatcaatctgcccaccagcagcactagcagtagtaccaccagcggtaagtttgaaaaaggacacacaagaggagttaccccgtaatgtgtatatataagtaatagtttacaattttaatgcttgtgttaacatttatgtttgcagaatcccattcggcatcgtcgcgcagcagtggtgcacaatctcagcatcagcagcagctaagcaatgctttggttggtccgcccatgggaggatccgctggggcttttcatggcggaacaaccagcgctgggtcctcgtcggtcatccagcagcagagcggcaagtcatcgccggctctgggcacgctagtcagtggcaacagtggtggtagcataatctccgccagtggctttccactaccgagtggtaatctcactgccacgaccactgagagcggcaacttgaagatcagctatgagaaacagacgacacgagtgcaacaattgcaggagcaggaggcgccaccggccagacgcagcaggtatgtgtgctcgactataagtcagccacattagtggccttatcgattggaatttgttgctagtgcttttgctagtacttgatagttcttttagtttatataagatatagtagtagatatatcttttcacaaccttactttatgattttgttgttgtgttgctgtgagtttcctcattttcactctgtgatattttgttacgttctgttcctatgaaatcgaaaagaatagatttttaggaatacttgaatttcgagccagattcgagttcgtatcttttttaataacatgaatgaaagtaatagaatcttccaaacttcttatttgtttcccaaaagattcagaactgacttggataataccttattgttttctctcagttgcatctcattatctgaagcattacttttcatttcaattcaatatttcggttcacttgtgcttatgtccacgcaaagttgaagaacgtaaatccagaatgcgcgatctataaaaatcactttgtctctctctctctctcgtctctcgtttgcttaatgtcttcctacacaaaacacgatttaatcacccaaccaacccaccatcacacgtagatcgcgctccggtgagagtggcagtagtcaccaccatgcccatgcccatcaccaccaccatcaccccacccatcacaatagccatcaccaacaaaatccacagcagcagcaacagttacaccaacagcagcagcaaaacgcgtcatcgcatatgcacgcctgcaccaactcatcctcatccacctccacttccaccacctcttcctcgttgtccggcggaactgccccagccacgtcgtcctccaattccaagggtccctcgagatcgggcaaaaagcgtggcgctgcaatgaataagagcgagagtacgtcggtggcaacaacggcaacaccagcaactgttgctgccacaccagccgagaaacagagtcgccacagttcgcctcactacagtgcaacgccaaccccgccaccaacatctacgctaccaccagttgtatcctcgccggtggtgatgctgcaatctctgtcctcgtcctcaatagattccccgccagcgacagcagcggctggggcgacttcaaatagccgcaacacgcgcaataacagtagcaatggcaatcacaatggcgagcagacatcctcgtccagctcgtcctcttcgtcctcgtcttcgggtgggggcggcaccagtggtgcggctaatgtggttaatctgctagactctccggttaatatgtcagcttcaggaaactatcgcagcagcagcaactccaccggaaatgccttgccggcggcgagcagcaacgccagtcaagccaagcctctgaataagaaaatgttgcgtgcgcagcagacgcagctgtatcagcaacaacagcagcagcagcaatatgcaccccccgctagatccatttcccctacaaatcttagctcagcctcagcttccaactcagctagccttacgcacttgcaacaacagcaacagtcacatcagcaacatgaagatctagagattttgcaattcactaatactaataccactgcctcttccaatacgcccacgtcgaaacccaacaacagaacgcttgatctgagcacggcaagcgcttcatcgtcatcgccatctgcagtgcccgcgacaacatctcccttggtcgtactgagtaaccaattgccacttaactcggtggcagcaagtagttccaccggtggtctgaagtttacctacgagagtcagacccagatggacgtgcccatgatgcctgtgagcgccataaaggattccccgcccagttcgcccggctcagagataggatcggccatgcactccgcaactactgcacccggttccctgactggagcttcgacagcggcgactgctcaacctggaaatgtacggaagcgtggacgcaaggccaaagatgcgacgatagctgctgcagcggcggcagcggcagcagcagctgctctcagcaattctcaacaggatctcaaggatgtgcgcatactccagaatggggcgagcaatacaccgggcaatccagctggcagcacaccaacgcctcctgctactcccgcttcgtctaatgctgtcagctcagccagttcgatcattacacacacggccgcgcatatgctgggcaaccagatcaacccaaacagcagcgtggcccagaagctgtccgagcagctgcacatggaggtccaggatcactcgatctacactcccgattcaatgaactcgcaatacgccggagttccgttccccggcaagcaggtaaggatctttaaatatataccaaatgaataaaatacaaattatattattagatggaacaaactttaaatataatgttttttcttcttccagcgtaactccactgccgttcctagcaacgccacgccagctcaaaatccgctgcaatcgatgttcagcggtggcggcatgaacggcaacatgcccattccgcaaagtctggagcagctgctggagcgccagtgggagcagggctcgcagtttctcatggagcaagcgcagcactttgacagtgagtatgagtcgcatatcgggagctaaatgcttgttctatgaaattaacacttaatgtctcaatcgcagttgcctcgctgcttaattgcttgcaccagctgcagagcgaaaacctccggctggaggagcatgtgaccagcctgatagcgcgacgtgatcacctgctggcggtcaatgcgcgcctgcagatcccgctgagtaccatcgcaagcaacaccaaggccgaggcgcatggtaagtaagagagggcgcctgttctctcttgtacttggtgtcggcacttgctggctccaaccatgtggcactggaggagcccacatcccacttacacagccactgctcacagaccaaattttgcgtttagttatctgtacatccatattttgtttggtattcgttgtacatacaaattgaattcgagtccacttcgagttgtagtcttaagtaacttatattaagttaacaactaatctggttaccaatggtcatccgtataaacaaataatgtacatatatacatacacagctgtaaatcaaattacagattgttgcacaaaagcagtgattgagaaattatccattgcatttatcgactacattgacaactcgtcatctttttaaaacggaatgcttctttacccttatcatcgaaccataccacgactagataactttacccttatttatacttttaagttagttatatgtatttacggaaaatacggatctaattatacttactattgtaacgagatatgatttctttggtcaagttaatagttaagttctttggatatttaaaagcaaatacttttcgattttatttatttacaaaatgaataaaatgtttaatatattaaacacaaaaccaacacaaattctaaatttatttacttaagttttcgttatcagtgcctagagttttcagagtttgcttagccaaatattaacacgctgggttggttgatggttaactccagggcaaaagctgttacttttagttacacttaagttcgttgtgttgctgtctgttgcatgcagagaggaaatccccacacccacacactaagttcaacactcctctctctacctaccataccgcactcacaaattacaaactaatacaataccgcacaaacatataaatttcgtggagatggaacagcaacaacggggtactcacaaatctaaccaaaatgcttacagccgccatatcaacaacggcagctccaacaaccacaacaacaacctcaacaacaacagcaacatcaacttgtacaacttctgtcatttccacaatagcttccagcggcaacagcagcaccagcaccatcggactcggcagcagcacgagtgcccttaatgcggccacaacaatcgcagcagccgtctcactggcaacaacggccatcaataccaccatccccaccatggccaatagccggccaacagtggctgctgcgagttccagtggagtgctcgactatcgcggaccaggtgcaaccagcaacagcagcaatagcaacagcagcaacaatacaattagcaatagtgtgagcaacagcagtagtaatcctacaagctcttcgagtgccagcgtaccgcctgcatcatccatgtcgatctccggcatgagcatatccaatgcaaccaatttgggaatgaggtgagatttgccttactgaactttaaagcagtggtttatacatcttgggttataccatttttacagacacgtgtctgcagcccatggatccaacaatgctgggaacagcaacagcagcgtttggagcttaactgccagtagcaccgtcaacagcaacagtttgcatcaccaacattcatcgcagcagcagcagcagcatcaggcgcaacaccagtcgcatccgttgcagcaacagcagcagcagcagcaacaagtgcaacatcatctgcatcagtcgcaccacaccagcgctgctgtggcagccgctcatatgcttggcgtgggaatgagcctgggcgctggaggtggtgctgccggtggaattggacgaggtgggtcagcgacagccatggctgcaacagcagcaacaaccacaactacttttacgaccacagcgggcacgggcatgggtcagcagcaccaccacccacacccacaccaacatcctagcattcagattcaagtgggtggcggcggcgttggcgttgacggtttaagtagcacctcctcctcctatgcggtgcaccacgcggctctctacagcacgcatcatcaggtagtagagtgcgtgcgagcgagttcctgtgtgtgtgtcagtgtgattgtgggcgcatgtccttgccacatgagaatccataatcattagccagtgcctgttattcgtgcattcaaaccttttaattttgcgtcagctccatgatcatctacgcattactcagtcagtcattcattcgatcagtcaatcaatcggaaaagcgcaagaaattacaaaacacacaacgccactatttcgattttcatccgcttctatgcccataatagctcattgttaatataccattgctgttggcagctaacccgaaattgtttgttgtttttgtgtgccaggctgaaagagaagatcaatttgtgtatccttctaaaccaaatttttaaaaataatccaaaaactagtgtaaaatccttagtgaaagccttactcatccttgactttttactttcagtcccaactaaggcgcgacgataacctcgccaaaactagctgaaagtcgcacagtgagcaagtccttcagcagccgcagcaacagataaagttaaagagaaagcagcagtcactggccaaacgaggagcccgtcatagcagtaccagtaccagcagcagtagcagcaatcacggcagcaaaaaactgccccagcccagcaaatacagcaagctaagtgcggcggagtctagctttcggcagctgatcgacaaaaatgaagatgatgtaggtaccagaaatttgggtcgcactgtttgttcacgatactaaggcagttctgtcattacagctcagcagcaatagcagctcttcgaccttttcatcctcctcccagcagcagtcgtcggtggactacgaggcggaggacgagaacgaagacaagcagcgcaggccgttgcataagaacgacaacgacagtttgctgcacgttcaaaatttcctcaagtgcttcggaccgaatgcttatgcatcgaccaaaccatcaacacccactccagcaatcgcatcaaaacctctagccatcgttaagtcctctgccggagggcaactgcgtgcctggcgccagaattatagctctccaattaatggagttcaggccgccacctcaatagcaacattacaggcggcccagtcgacgacagccgtagcggaaaacacaagcaccagcactgccatgtttcaagcccaggccagtgcgaaccaaaagccaaccaagtttcaaataaacacaaagtttttgcgcaaaccacgcaacaaactactgaaaatgctgccgacagcggcagctctagctccaggtgcagcgaccactgaattcaagcaacaggaggagcaactgcagcagccgcagatgttcaacgatgattccaacgccaaattcaaagacttttcaatcgactcgttattgaataagtaa

SEQ ID NO: 25 - protein, 1744 aa, Drosophila melanogaster
MMMMDTMDTSQSQPMDVAPAVAVAATSGAALVDFTAAMVSMAATAEAESAESNNNHIDMAEYKEHRKNKKKKREKREREGKEHRHHKHRDREHREHRRHRDRDRDKERDREGHHHHPTHHHPNNSQHSTSASSSPSSASTTPSATIEYVGGSASASPSYLGGGATGTGAAVGATTTYPHNLKIRFLLSGQRTELSPPTHQTSATAEVNAPLASSTSASIAVTASATAASAPPATGTTTLGSSISGNAGSTSSGNSSGVSATGGAQSAVGSGGYPKTESSKSSGTASAGSGSGSSSNTSSTKHGSNIKDISSSSNQQASTASSSSAPSLYVSVPLSTANVPGINLPTSSTSSSTTSESHSASSRSSGAQSQHQQQLSNALVGPPMGGSAGAFHGGTTSAGSSSVIQQQSGKSSPALGTLVSGNSGGSIISASGFPLPSGNLTATTTESGNLKISYEKQTTRVQQLQEQEAPPARRSRSRSGESGSSHHHAHAHHHHHHPTHHNSHHQQNPQQQQQLHQQQQQNASSHMHACTNSSSSTSTSTTSSSLSGGTAPATSSSNSKGPSRSGKKRGAAMNKSESTSVATTATPATVAATPAEKQSRHSSPHYSATPTPPPTSTLPPVVSSPVVMLQSLSSSSIDSPPATAAAGATSNSRNTRNNSSNGNHNGEQTSSSSSSSSSSSSGGGGTSGAANVVNLLDSPVNMSASGNYRSSSNSTGNALPAASSNASQAKPLNKKMLRAQQTQLYQQQQQQQQYAPPARSISPTNLSSASASNSASLTHLQQQQQSHQQHEDLEILQFTNTNTTASSNTPTSKPNNRTLDLSTASASSSSPSAVPATTSPLVVLSNQLPLNSVAASSSTGGLKFTYESQTQMDVPMMPVSAIKDSPPSSPGSEIGSAMHSATTAPGSLTGASTAATAQPGNVRKRGRKAKDATIAAAAAAAAAAAALSNSQQDLKDVRILQNGASNTPGNPAGSTPTPPATPASSNAVSSASSIITHTAAHMLGNQINPNSSVAQKLSEQLHMEVQDHSIYTPDSMNSQYAGVPFPGKQRNSTAVPSNATPAQNPLQSMFSGGGMNGNMPIPQSLEQLLERQWEQGSQFLMEQAQHFDIASLLNCLHQLQSENLRLEEHVTSLIARRDHLLAVNARLQIPLSTIASNTKAEAHAAISTTAAPTTTTTTSTTTATSTCTTSVISTIASSGNSSTSTIGLGSSTSALNAATTIAAAVSLATTAINTTIPTMANSRPTVAAASSSGVLDYRGPGATSNSSNSNSSNNTISNSVSNSSSNPTSSSSASVPPASSMSISGMSISNATNLGMRHVSAAHGSNNAGNSNSSVWSLTASSTVNSNSLHHQHSSQQQQQHQAQHQSHPLQQQQQQQQQVQHHLHQSHHTSAAVAAAHMLGVGMSLGAGGGAAGGIGRAGTGMGQQHHHPHPHQHPSIQIQVGGGGVGVDGLSSTSSSYAVHHAALYSTHHQPQQQIKLKRKQQSLAKRGARHSSTSTSSSSSNHGSKKLPQPSKYSKLSAAESSFRQLIDKNEDDLSSNSSSSTFSSSSQQQSSVDYEAEDENEDKQRRPLHKNDNDSLLHVQNFLKCFGPNAYASTKPSTPTPAIASKPLAIVKSSAGGQLRAWRQNYSSPINGVQAATSIATLQAAQSTTAVAENTSTSTAMFQAQASANQKPTKFQINTKFLRKPRNKLLKMLPTAAALAPGAATTEFKQQEEQLQQPQMFNDDSNAKFKDFSIDSLLNK

SEQ ID NO: 26 - DNA, 6413 bp, Drosophila melanogaster
  misc_feature (1)..(6413): n = a, t, c, or g
gaattccttcacaggcggtttcttggccgcattatcgttaatattgttgttggacatgtacagctcgcattgctgcactattttatccaattttcgaatttcgctcagttccacgcaagatttgtgggacatttttaagtctgcaaagtatagaaacgaaaaagtgttgcaaattataatcaaacattcgcaaagctcagaatatccggattcgtaagcaaattcaaataaatcttcgcttaaaaacaacttaataataaatccaaaatttccacttactccagattgaaattggcgaaaactgcgatttcttacctaatgcactttcttatttacttgcaaatcaaaacagaacaggtatgacatgcacgcggagaaatcaggagtggaaaatcattttcaatcaattaaaaacacttcaattcgatcttgttcgttacacatactctactttttaaatatcatagataaaataaaaaaatgaatagatgtatgtaaatacatggcattttcatttcgaagtcaactgctttataagaccaacttttttttcccggtgtaatcaggctttgcttttctgaaattttcagacatgcgtactgctttcggttttcaaagattcgaaaccaccgtgattttcgaaccattgttattttccttctcgcattcggtcacactattttcaaacgtaaacaattgatttttcctgctaaacaaaagtggttgaaaatgtcgggaatcgctgccaaaaagattgccgaagcggaggacctggtgaagcaggccgagaagaggtatccccaacaaaaatatccttataaaggggtttccaaataacacccatctttatttgcagcttgaagttgtccatgctgaaatgggttcctgattacgatagtgctgcggatgagtattccaaagctggtgagtttcacaaagtaggagtgactaatatcacccagagtatctatctataaaaacattgtgacatcaatgagatatgtaaatactatgaattacagctaacgattatcccaaagtatccataacttgcaagatacacacatattggtgtacaattatgtatctttcttttacatttttaattgcagccactgcatatcgaatagctaaaagttatgataagagcaaggagtgttttctgaaggcaatcgacgcctataaaaacaacaagtcttggttccatgctgcaaaggcatacgaacaggtgagcttaaattgaagttaatataagtgaagttaataggaaatttaaaccctctaaatgtgcacatcttctagatcattttgctgtcaaaggatgccgataagctacacgaagttgaggaatacgccaacaaatcggcgagtttgtatcaacagcacggttccccagaggcagccgcatccgccttggataaagccgccaagttaactgaatccaagcatcctgacatggctttgcgcttctatcagcatgctctagaagtcataatggttcgtcctatttgacactgctctagtcaattccattcttaaactattaattttatacttacccgacagatcgaggattccgtccgtcaagcagccgagtatgatcaaaagtttccaggatactggtcaaactaaggaggtatgtacctatgattgcaacgaatcactttgggtatccttagcttatatcatccaatcactccaggtacgacgaagccacgaatgcgctcaaaaaggagatcagcttgaatcagcaaacggaatcttacggacaaattggacgcctagttgtggccttggtgatggtccaactggctcgcggggattccgtggaagccgaaaagaccttcagggagtggggaaactgctgcgagccagaggaagtgtccacactgcagacccttctgcaagccttcgatgacgaggatcccgagttagctgctaggatgctggcatcccnattcatacgacatatggatgttgagtacgctattctatctaaaaacattccactacctcagggtatacagatggagaagaaggctggcgacactgctgctgtgagtatttttattctaaaaatggaatttgcaatttttgttttgtaaatttggctcttattatgatgttatcgataggcgattgaatctgcctttgttgtcgatagaagacttgggacagtgcgaagcagtaaactaaatagctaacaagaatttcgtattttctctctttctctctcgcaggaaaccaacgacgccgaggacgaaggtggcttgtgctaaatttcttaatgttcggtctgcttgttagtcaaaatatatttatcgttaataatatcgcttttaacatattatattaactgttaaatacaaatttcatcgcaatcgttgtactaattaataaatactaagatcaatactatacaacaaagaatatcattagctttgggatgaattgatattgaagtaataaattgtagctataagtgtaaactatgtatatatattctatgttccaaaacagcgaatgtgttaagattcaaatctgtaaatcttcagctttattacacgaaagtatagtgcaatttgttaatataaataaataaattaactcaaactatactatgtattttaaagcaccctaaaatatttgacattttgaaagatcgaaagtgtgccatttcaccgttccaaacgcttcacaaacgtcgcgacgcgtcacgacgcatgttgatactttgccggcgcctggcaaccctaacctgtgcgaaataaccgaccaaattgattcgtccggttgttcgtgaaagaaggcggaaggttaaacagtatttgtaaaatatatactcggcgaagcagcaatttgagaattgtgaaagcgaaaaactacaggaaaaatggtacgtacacttgggactcgcattcagactcggtggtaaaagcggccggtcattgtgcacttttggaagcgaggtggagtgcaaataatgtcttcgattcgatgaatcatataagcatctctcctttgaaatctgtatatacatacatatttagataagtgtgtatatatcaatcatacatatatttccacttttttttgcctatatgttcgttggccatattcgggcatatacatggtcatgaatgtgtgcgtatacatatataccaaattagtcattggtagcagcggatattactcatttattggagtgtttcatacttctcagccgccactcacactcataactggcaaattcgcgaaaggcaatcgcgaaagaatgctccaaagtggcagctggaaaaatggagcgattaaaaattgaaatgttggaaagagaaatgcacacacattggattttcatgtctatacatatatatatttttacacacttgagcgtgtgtgggtataccgctttttttatatttcgatggctataaatatgtgcgtatgtatgtatctgcggggcaatgcttaatgcttattttctcgcagacgcaaaatgtgtgtacatatgtacgtccatattaccatacagaaatatgtatcaatatatatccatatatgtatctgcaggcatacatatttaaggtgtgatcgtttccttgccgccttgcggatgttcatacatacatacacatgatgtttagctgtgtgtgtgcagcagacgactgtttgcatgtgggacgattttgattttctcgacattttccgaatattatggaaaatcgggcattttccaccgttttgtgagcgcaacgaaatcgtggggaaacagccacctcccttttagttttctttctccctcttgtcggcttgttctcacccttaaacttgccggcacttgtgaacttacccttgaactttccgagcgccgggaaaaaaagaaaggaaaatctaactgtaaatggtgccacgcccaccactcccagataaatcggcgtgccaagtgtgcgcacgccttaaccggtaaaagttctgcggtggcaatgcaaataaagtagcataaattatttacctttatgtttgttattgccggcaatcaaagaaataaaattgcaaagtcgaaaagggacggatatactgtcagctgaaggtgggcagttatgtctgccagtcagttacatacgcacatatgtacatcagtgaggtacagggtgcctcgtgtcttatgtgggcataaaacattgaacttcacttatttttttttacaattcaactacttggtacttcatgaacatttgttttaagggaatacttggggaaacgcaaagagagcaccctgtatcacatacatgcacacacacttggttgacagtttggcgcgcattgaacattcaaaatacattctctgatttgcatctctaccttctctctctctaaaggcttctggtgtaactgtgtctgatgtctgcaagactacatacgaggaaataaagaaggacaaaaagcatcgctatgtcatcttttacattcgcgatgaaaagcagattgatgtggagactgtggcagatcgcaacgccgagtacgaccagtttctagaagatatccagaaatgcggacctggagagtgccggtaagttccgccggttagagacacccagacccatcgaaactaacctaatttaacatctattcgcttgcacaggtacggactgttcgatttcgagtacatgcaccagtgtcaaggcacctctgagagttcaaagaagcaaaagctgttccttatgtcgtggtgtcccgatactgccaaggtatgtgaatagccagttgccaagtaatggcgcagaactcatttcgatatcacacacccacaggtcaagaagaagatgttgtactccagctccttcgatgctctcaagaagtcgctcgtgggcgtccaaaagtatatacaagccactgatctttccgaagcctcccgggaagccgtcgaggagaaactccgggccaccgaccgccaataaactgtacgagcactgtgcattgcatttaacaaacaaggcatgcatgaaacagcgatggaaacacgtatcctgttgagatcgccaatttgtatgagaattttctacataatttgtattttcagtagaaataaagaatgaaatatttaacttgaccaagtcgcgtttccgctgtggtaaaaatctcgtaccgcagaatacactttattataaggagcaaagattacattgtacatatgatgacggttctaacttatagaccgaacgcttaatagccatgctggatcactagagtctggagaacctttctaatctggtggccagtgttcaggcacgacttcaagcccagcgagaaggccaccgttaggatgtcgattgcgtgttcctgcagcagcaccgacatctccggcagattgtcaatggccgtcgctgccaccgaggagttctcgtcccgcaggcactgaatgtaggcgttaagggtgcacaggttgatgtccgaattgccgggattgtgcttcagatgcctgatcagtatgatgaaggcgatggaccggatctgggcactcggcgagaatataaggttgagcagtcgttcgaacagctcgttgatgaacacaaatctcttggaagtgaggcactccagctcctgcatgggacccaagaccacgtcctccgtgttggactgctttatgatcttgaccagatcgaggaagtgcggcgatatgtccgtgtagttcgaccggctgtacgagcccaaggttagaaccgataagggacccctactgctgcttggatcgatkggtgtttgcgnattcacttcgatggnatcctctgttaccacgggcttgctggcngatggctttacatcgaaatgctcatccagatcgtactcgtacttaacttcctcgtcgtccaattccntsgccgagtgcgacttgtgctgcagcaggncaacggcctggaccaaaacctgcagtttgcctagtgaggtgtacttggctgcaagttccttcaggatgcccacgtactgttcgatgaagagcagagcacttgagggattgtagttgatgtaggcttggagcatctgcacaaacttgttcagcatttggcaggcctcttttacgttgctgtggtgcttgaagaagttgaagtagcacgacagcgtgttttggatctcgttcttgtacgcctcctcaaagatggttggttgcagcagctccagcgtcctcaggatctgtacaaatcggtggaagtggtgctcctcgcgcagggccttcatgctgagctgggcccgaccttgcataatggacgacagcacgcccagctggcgaaggaagagaagcgggtgggaggcagccagcttgcgaaggagcagctcggtgtccgtggacagggtttcaaagtcctttttgcccaccagactgcccaagcaggtgatccgttgacctgcaggtcgac

SEQ ID NO: 27 - protein, 148 aa, Drosophila melanogaster
MASGVTVSDVCKTTYEEIKKDKKHRYVIFYIRDEKQIDVETVADRNAEYDQFLEDIQKCGPGECRYGLFDFEYMHQCQGTSESSKKQKLFLMSWCPDTAKVKKKMLYSSSFDALKKSLVGVQKYIQATDLSEASREAVEEKLRATDRQ

SEQ ID NO: 28 - DNA, 7242 bp, Drosophila melanogaster
tacagcgaagtcaactctgtcgaccggtacaccaaacggaacgcttcttctaaacctggtagatatctgcttttgttagggggtctgcacggatattttctccgacagttcgactaggatgtgggatattagacacttttcgaccggttccaaatgctacggttgccagactactagttatatctggagtgcgtgtcagaccttccgcttctccacctttttgaccagtttaatttgtttcttcggaaagggcggttccggagcgtagttttcgcgtaactttaaagcgctccaaatgatctctttgtcatagttgggaggtttcaattccgcctttggatactctttataaaagtctatgggacgagattgcatctccttagatattttgaatgaaggtatctggacgtccctggtaactaaacacatcgaccgtctatagctttcgactcgtcccttgaaagtgtatgagggacctaaaacttaccggtttccgagtacctcctgtcatagctcctttaatattaatccgtacagccaggggtgaaatgtctcttcgacccgttttagtggaagtacagctcaccgtctcttctacacctgcaggctacggacccctttccttccggaaaacaagatctttaaggtttacggttttcctcaacggattgatttctacttcggaaacgctaccttgcccgacacctacgcagaccataccacagatatgtagtggaggttcagcacgggtctcttcttaattgggtgtatttctgccctcttctcgtctttttctttaagatagcgcgagaaacacgggacgttcttggtcatagtcatttctaagaccttgttgacgtttatagtcgttcgaaattgtatgttgttttctgggggtatgctcaagaagtagcagcaggtaacgtgtgcgcagggtcttgttaaatgtcacagtggcggttccacgtagcacctttaggttttcggaactagtagctataacagtgagttcgcccctgaatgtattttctcaatcaagtaccgcttaaaccatcctggtgcggtagtaacaggagataatatccgtttgggtacctataagttcgagatctacaccacccttagctaaatctaaccggtgtacttcatctattgagctttgtgttccttatcgctataataacaatccatgtttaggtaaatttacaatttacgaattgtgaatttaacgtttttacgtctcttatttgttgttgtatacacctacttaaaactaatgattcaagtaatatacaaatcaagttttagtagttttgggtctaatgccccatattgggatcggaaaaaaagccagataagtttgaacaggtcataataaggcactgaaacttagagctaggggttttataaccattgtctcaatctgtcgctcggtctcctgtttcgcctgtacgcgtcaattacattaaacctcagttcaacgcacgagagtggtatccgtccaaggttataaccgatgttttcatatttcattcgcctgtttaagccgtaagcaacgatcgctcaacgagaccaaacaataccagttcagttcacctcacctattttaaactttcactggctcgtatcatcggtccggtaaacgttggcctacgttcgcacgcactgttaattttgtactcgggcacacgcgttagccctcagtcaaccaatctattaacttaaatttttctcgccgggtcatacaaaaaggccgcgcaaaacctatcacggtctttagtaaacgggggattcagctggtgcctttcaggccgtcacgtaataatgtcgctcctgtcactctcacagtgtatacactcaccacggcagctgacacttcagttcctgtcattattgttggtcagtcgtcagccgcgcccacgaggtgatggtcgatattacttttaagtcgcggctcgccttcgaggatagccacgtcacgtcgattgcggcgacacccttgtgtatgacgcgtgggcggcggaaggcctttgttaaaagggatcgcggtacatgcgcctcaaggtactcgcggacgtcctgggtctcaccgtccactccgtcgtgcgagacgctcaggagcaactgcaggaccaccactacgttctgctccggctaccggtatacctcgccctcgtcgaataaccagacgaccagctcttggaaccagtggttcgggggtggcacgcgtttcctcgagagctaacgaacgctcagatagagcggctttgacgttaaggcctctgccaatacgacccttaaaatctgcgtccggactgcttcgtccacggtcgcctaagcctcgtgtacccagcggaatcgacgccgcaaaacgacaggcacggacgggaagacgttagttattacgtatgccgcgtctctgtggcgtaacacgtatcgtggcacctcgctcaccagcgtgtgtacctagttcaccacgtcgttctttagtggcattttcagaattcgttctagtccctcgaaaacccgcaagtgctcaagcttctttaatacccgttgcacccagcacctctatgcgacagatccatgatggttgacagagtccaaatgccccacagaccttttagcttttgtcccccgcttcattttcgaccgcggaccgcgcggaatggtgcactcgttcctacctctttgccgttacgacatgtcttggacctgtggtgcgaggtttatgtcagtttgacgaacctgtaccctttctagtaatacctttgtctttagttctagttgctactatgtcactgatacgcctaagacctccgcctatggctctggcttctcagactatcgggttgttcctaaaagagattacttcttctaccctgcctaaattaaacggtgggggaaagcaggtcaccgtcgtgggtggttctcggattatatccccgcccctaacactttcaatattcactaagtcttaacctactcggcgtgtagttccgcccatcacaaaggctcggcccatgagggagagcccctaatttcgctcattggaagcctccactctagcaattctacgcttgaggactatcgctgcgtcggaggagatgtttgttaagagcttcgggatgggtctggttagtctcataatgacaaagcagaagccttctacgtcgctagaggctggaccagagtagtctgctcttcagatgggaaagatctgggcagttactgttctcctggtgccgtgagcacgacctctagggaaagctgttatggttcggtaacggagttctggctagtaatacgagcgtcggagtggccgtagtctcgttacgcgtctcactcggcagtagcttgtcaggggcgttagccgtccttttgtttcgtgccgacagcggtagtggatcgagagggcccaaagcgtcggcgtcgtgatcaggctgcccttcgttgttgtagtcgggttttcacggcgtgttcgtttagctccaagacgtgttagacgtcgcgctaggcagaggcgcaagagtcgctgcgagtcttctgtacctacccttacccctaccttttcgggaagtacgttgtcccttagggagaaggagtggttgtgtcggcgaataatcagcttgttctaggcggagatgctacagaggacacagtggccggtgcggctttagcaccctcctagacctgtaacacttgaatttctgcgagaacctcaacgctagaccccatacaaggatttcgcaatactgattcaggtttattaacgtaattttaatcaccggctgtaaatcgttaggagcacattaacgtggggagattagttcagaggtcgtaccagatgaaacacgctggtttttatttcgttactttagtgaagtgtgcgatgcggttgcgcccaaggcccagcgtccgcgaaacccgagattgacccagtcatcctatacatgttaaagtatacgcaagtattaagacggaagtattaccgtcggcgggacgaaataacgcctgctctgtgcgtagtgagggggtcatccataacgatattgcccacgataatatagcgaggaatgattacttttaaagtcgctattcgctcgtgagaggggatcggccgtgagtataaccactgatatctcatccctggccgaagagagcccgatgacatggttactggataattaaaaagatgcgagtgcatgaatcttgtatttcccttcctcaattgatgctcataatgtgcatcaatgtgcagcttcttgaacgtgtttagggaagttttcaataagtttcacatgtacttatacgaaaacaaaaacagtaaaggaactgcctattagtttggtcaacacgaaaaatgtatgataagaacattgactaacatttaaaattgcagatgttttcacccgtgtgatgtcaatcctagtcacctggtaaacgcagtcaagaatctatgatcaacttcaagcgtacgtgtgacggtttgtaaaaaaagaaccgttctaagttgacttttaaaattatcagtaacacattatattatatttaatatataatatttgtactgtagatgtaagagccaaaacggctcaagggtcaaagggtacaaatcaatttcctttattaagtgtcattgccgttttttcttacctgctaaattttttttttgaatatttgcctttttaacgatttttttttttcacgcagtctttttattaagcaataaaacgatatgagtcccaaccgttaacgacggagtctacatggagaatagtcctggttgaaaaactcaccacgtgtttttgaaatcctaaggccaccgtcaacgtacaacacgtctgacccgcaacttaaccctacctaacgaagcgattccctcgacgccggcttgtggttcccaaggagcggtaacggcaacgaccgaccagttagtaaattcacgtgcgctaaaagtatcatggtcttggtccgagtttcgttcttctggttgttattgaccgagggtcgaacgtcgaacatacgctgctttttcatcattctgatggtaatgtcatgccacaaactacttctgcgaccgggatcccttttcccaccccctcgtctcgcacagacgttgacccagtaaagttcgtgtttttatatttattgtaattgcttttagtgtcgcgcaagatttatcttcgtcctaacatgcagcgataactggcgatcggaaacctggaaaaagaacgtacctgttaaagtattgatattcatatgggcagtgaacatctcattttttcttagattctccactagtcttagtgaacgggacgctagcacactttttattagataattaaacaaagataaattcttcgcgtgttactcaatcatgttctagctcggccaatcgtacaaatattcatgtgtataaaaactgttttatttcaagtagtttactgcaaaaactgtgaaagtcatctgcaacaatgtacagtacgtgtgtgtcaagaacatagattaaagacgccgtaattaaaagcttaaacgatttaatcgtgtttacccggtattttgtgatccgtgcggttttacatgaatggctaataagtgaagaaacaaaatgaataagatcctaaccgcgttagcagattacccgtatccggttgacctcgaacggaattcgagaagctcgttaaaccggaaccaggttggcatagacctatcagacgaagcttgggaggagagtagcctcgcagtgaaactccagaggctagaattcgctctcgatgaccaattggattagagcgcggatggtaacctgttgaacctcctcgcgtgtggtgtctaaaacagccctgagacagcggtcccgttgcgacctcgtttggcccatacgttccgagactacgtcgcggaagggcgcccttggtatcaacgattcgactggagtggtcttaaggaggtacgtttctcaagtttccaaacaataagacgtaacgtgctagggttaataacttagaagtacatggcgtcaaggccctggtgcgagaagtttacagttaaaaacgcgactactggaagggcccttggacgaagctgtagtcggacaactgctgagtccggcagatgagggaagaattggcttttgctgcccacgccgtccgccgagacctccaagatcgtcaagaacggctatagagcaggtagtttctccaaaattggtaacacagcctctgttgcctgccgcatctcgaacccggttaccacaacctccgctgttcacacgccgatagcgcaaatgttgacgggtagcaatgagggctgtcgccgcacgagaagcaaaagttggtctgactaggtggacctcggtccgctaaacctcgactacatctgacctaggtagtcccactcccgagacggagagggttatgttaattctccgctgcgtacgcccgacgttcgtcggtcgcgttacatgaaccccctcgccttcgttttttgttcttactaggtaaggggtccatgctttgttccaaatgaatctccataagaataggtgtattcggagtatagcgttttatcgtaacaatgcaatctttccgcaatattcatatcttaattctaatttttaagcggggttggaaatcttgactgttttcgtgaagttattttacgtataggcgtcaaagtccgtccagttgctctcgcacgtagcggtaaggaaggtaagggggggcctttgcaacctgtaccgatcgggttaattacaatcaggttatggaaaacaataaaaattatcttgattttattgaagagggatcctgaaaagcgtttctaattcaaaaccgcgattctgattgccaccatccagagaagacttaaataagttatataagttattgtgattggtaacgcttgcgtccttcagttaggaaataacttgcagcgaaaaaccggttccgcacgagactatgaaggtacctgccggcttcatggctgtcgtggtggtgatggacgtcgtcaccatcgcggtgtctgtcgaaatatgtcgagtgaagggcgtgcccgccagctgaacggcctggtttgaggtccaaacgtaacagtgggtggttgcagtctcgtcgaattattttgtgatgagtgtctaaagggtggtacttggtcgtacgtctgaaacagttgttaaaatacgcgtcgtacgtcgctccgagattcagggtaaggcacctctctggcttgatgggcttc

SEQ ID NO: 29 - protein, 1404 aa, Drosophila melanogaster
MSLQLRQLAMWFALRRRFGPSIDENNPPDVPIKEAVKLILHPIICEKLAKVYDANGLMINIDLTHSLEGEEVEKLVKLNKEAFPAKASHQKRIEISRGLLEKQYQPSKVKAETYEKYFQIPCSNVEESIKLTSIDLQGPLICVAGRYRKLSRELSHTPWILNGQRLMEDSIEEIIIRHVGPHFTEKLGKITFMSSGREDVDVRCLGKGRPFVLEIPNAKRSCLTKDEAFAMERAVDASGMVSIHHLQVVPREELTHIKTGEEQKKKFYRALCALQEPVSVKILEQLQISASFNIQQKTPIRVLHRRPLHTRPRTIYSVTAKVHRGNPKALIIDIVTQAGTYIKELVHGEFGRTTPSLSSIIGKPMDIQALDVSTTESPAVHYYSEDSESVTYVSGAVDCEVKDSNNNQSAVGAGAPLPAIMKIQRRAEAPIGAVQLTPLWEHILRTRRLPETIFPSAMYAEFHERLQDPEWQVRQHALRVLVDVLVVMQDEADGHMEREQLIGLLVENLGHQAPTVRKGALDCLRVYLAETAIPETVMLGILDAGLTKQVPADSEHMGRLSCGVLLSVPALLQSIMHTAQRHRIVHSTVERVVAHMDQVVQQEITVKVLSKIRELLGVHEFEEIMGNVGRGDTLSRYYQLSQVYGVSGKSKTGGEVKAGAWRALPREQGWRNGNAVQNLDTTLQIQSNCLDMGKIIMETEIKINDDTVTMRILEADTETEDGSTHQEPNIGAGIVKVISDSELDEPHIKAGSVSEPGTPSRGLKRVTFGGEIVKMRTPDSDAASSTNNSRSPTQTNQSITVSSSEDAAISDLVSSDEKSTLSRPVNDKRTTALVLEIPFDNTKPLPQDRSLCSQPHRHQSNAQSEPSSNSPRNRQENKARLSPSPSSPGFRSRSTSPTGSNNISPKVPHKQIEVLHNLQRDPSPRSQRRSEDMDGNGDGKALHATGNPSSSPTQPLISRTRSASTMSPVSPATPKSWEDLDIVNLKTLLELRSGDWRNRLMGIGQLELALSSSSNLALVQPYLDSLLRTLLSSERHFEVSDLKRELLVNLISRLPLDNLEERTPQILSGLCRQGNAGANRVCKALMQRLPAGTIVAKLTSPEFLHAKSSKFRDHALQMSIFALMTFPGTCFDISLLTTQAVYSLLNRKRRVRQAALEVLAVLADISSIKEVLTIVSETTDGVELGPMVLEATSVRLSRLQLPIVTPDSGVLFVFNQTDPPGARRFGADVDWIHQGEGSASPNTIKRRRMRAASSQRNVLGGAEAKNKNDPFPRQVNESVHRHSFHSPPETLDMASPINDFSQRLSFGAKTNGGSQSFIERRFLAKACSDTSMDGRSTDSTTTTCSSGSATDSFIQLTSRTGGRLAGPNSRFPTMNQHADFVNNFMRSMQRGSKSHSVERPNYPK

SEQ ID NO: 30 - DNA, 1654 bp, Drosophila melanogaster
cagttttatactaacttttgacgacatcagatcacaaattgctgggaggtttgcaccccaatcaaagcaagttttacaacaaaagtcaattttcgttcgactcgatttcttctcagtgcgttaagttgcaaccattaagtgtgaaaatgccatccaatatgaataataaactcgacccagtgtttagtagtggcttcgttagaagagaatttaatgacagcggaattgccgacggcaagctccgcaccatctcgacttcgtcttgcgccacgaccatgtcctcggagtcctaccgcatctctctcggcgtagggcctctgtggtggtcctgatgtccctgtccaccacagaacagatcacgatagggcatcgctcttaacgggctacagccgtaagtcttcggtcgactcggctggtggcagcctgtacgaggccagctcccgggcgtcgtcgttgtcgtcctcccagtcggattgctccgacttggagtcgcagcccgacatccactcgctgtgctcggacgatgactgccaggaagtgctgcgccagatcttgcagcacgaccagccggtgcagatcaccatcaagctgcatgtcaccgaggaccagtacaccaattggaatacgattctgaacccagtcaacaacttgttgtatgtcgctctaccgaaggaccttcctccggccggctccaagcagaccttcatctcgcttctggagttcgccgaggagaagctggaggtggacggcatcgttatggtaatgcctaaagatcagccggatcgagctcgcctcatcgaggcgttcctcttcatgggcttcgagccgctgtccaggaaggcaccgcaggcaccgccggctgctattaacgacaacgagaactactacttcctctacagcatcgaggagtagttcgtcggcaaggggacgattttcgccacagaaacgaaacaaagaagaagtaatatcagtagcaatcccaatattctgtttcgtagtttccgcaaataacttttattagccagccgtagatacaatgacatattgagctcaatatgtgttcagtgaaaatcagcaaatcaatcctttttgaatcttcgcgttgtttatgtagtcgaaaatcgttttgaaaattgtcttcggagcggcttcatttttggtaggctttcaattatggccagccacgttaagagcctgatcgcaaattactatattaaactatatccaacaacaacaaaaatcgaacgaaaacgtaaaaaaaagtagaaaactaaaaaatgtcaaaaaaaaaaaaaaaaacaaaacaaaacaaaggaatgtattaatcctaagtttattcgtgaatcaatattttttatttatgttttcatgtctaatcaacatatatattttcttcatgttttttctatatattttatgtttaagcttatatatgaagtattgtaatcccaatttgttcgcacttaaaaatattcaatatatttttattcactttttgtacgccgaaagcgacgagaacggcgaggtagaagttttgaaggatagaaagggaaacgcatatgcatagaagctaattacatagatcagcaaaaaggatccacatacacgctatatccaatattaataaacttattaatcaatagattccacaccg

SEQ ID NO: 31 - protein, 254 aa, Drosophila melanogaster
MPSNMNNKLDPVFSSGFVRREFNDSGIADGKLRTISTSSCATTMSSESYRISLGVGPLWWSDVPVHHRTDHDRASLLTGYSRKSSVDSAGGSLYEASSRASSLSSSQSDCSDLESQPDIHSLCSDDDCQEVLRQILQHDQPVQITIKLHVTEDQYTNWNTILNPVNNLLYVALPKDLPPAGSKQTFISLLEFAEEKLEVDGIVMVMPKDQPDRARLIEAFLFMGFEPLSRKAPQAPPAAINDNENYYFLYSIEE

SEQ ID NO: 32 - DNA, 2163 bp, Drosophila melanogaster
  misc_feature (1)..(2163): n = a, t, c, or g
cgtgggccaaagtgcccaactcaccctgtgcgcgcagaatggccgccttgccccgtcccgccgtcccaccaagtcccttgcccgtctgcttcttgaacatcggggcatttttcagcatgtcgggcagtatgaggaatcggatcttggagccgcgaatgtagacgttctccaggttggcggtgcgtccgtctcggtaggtcaccgtgatctgggtcatttggcagttcatgttgtcctccgcctcgatgagtttgccgcggtacacctcgccggtgatggtttcgcaagtgattatgtggccctcggcctcgtgcagaactttaatgggcactccgatagacatgttcgctagcttggtatgttgcttgtctgttcttgttcgttcaactatatatttttcactgtttttttttccaccgaaaccgctaaantttttctccgtttttctttgtgcaagcgtttatgccgagtgtttgcgagtgtatgtgtttgcgtgctcgctcccgctttgacagctgccggcggccatcttgtggtgaaattggtggtgcgtgagcgcagggctgcatgcgctgcgtgactatcggaaacagcttatcggtttgccgataaggcgcgcgggcgtatcttatcgctttaaaataaacaactgcaatttgttagcgtcataaaagcgaaataattaaattgtcgccgcttcgctgataagcctttcgttctgccttcgtggccatcagtttgttagcagcttttgcgacgttcagttaccaattgagttttactctacaccatgttgtggtaaagatttcgggtttataaattcaattcataattcacataagtaatttgtaaatgggaaataatctttataaaaacatgggaatattcgctatatgcttgccattaaaaaggggatataaactttccaacagatggagttgcgctacaaaatcgaacaggcacatcgcagttcgatatggggttttttgactaaatacccaatttttttccacagcgacccagtgtttagtagtggcttcgttagaagagaatttaatgacagcggaattgccgacggcaagctccgcaccatctcgacttcgtcttgcgccacgaccatgtcctcggagtcctaccgcatctctctctgcgtagggcctctgtggtggtcctgatgtccctgtccaccacagaacagatcacgatagggcatcgctcttaacgggtgagtaataataactaaccatttaagtacttattatgctaaaatgtgttaattccttccgtgtaggctacagccgtaagtcttcggtcgactcggctggtggcagcctgtacgaggccagctcccgggcgtcgtcgttgtcgtcctcccagtcggattgctccgacttggagtcgcagcccgacatccactcgctgtgctcggacgatgactgccaggaagtgctgcgccagatcttgcagcacgaccagccggtgcagatcaccatcaagctgcatgtcaccgaggaccagtacaccaattggaatacgattctgaacccagtcaacaacttgttgtatgtcgctctaccgaaggaccttcctccggccggctccaagcagaccttcatctcgcttctggagttcgccgaggagaagctggaggtggacggcatcgttatggtaatgcctaaagatcagccggatcgagctcgcctcatcgaggcgttcctcttcatgggcttcgagccgctgtccaggaaggcaccgcaggcaccgccggctgctattaacgacaacgagaactactacttcctctacagcatcgaggagtagttcgtcggcaaggggacgattttcgccacagaaacgaaacaaagaagaagtaatatcagtagcaatcccaatattctgtttcgtagtttccgcaaataacttttattagccagccgtagatacaatgacatattgagctcaatatgtgttcagtgaaaatcagcaaatcaatcctttttgaatcttcgcgttgtttatgtagtcgaaaatcgttttgaaaattgtcttcggagcggcttcatttttggtaggctttcaattatggccagccacgttaagagcctgatcgcaaattactatattaaactatatccaacaacaacaaaaatcgaacgaaaacgt

SEQ ID NO: 33 - protein, 186 aa, Drosophila melanogaster
MLKCVNSFRVGYSRKSSVDSAGGSLYEASSRASSLSSSQSDCSDLESQPDIHSLCSDDDCQEVLRQILQHDQPVQITIKLHVTEDQYTNWNTILNPVNNLLYVALPKDLPPAGSKQTFISLLEFAEEKLEVDGIVMVMPKDQPDRARLIEAFLFMGFEPLSRKAPQAPPAAINDNENYYFLYSIEE

SEQ ID NO: 34 - DNA, 749 bp, Drosophila melanogaster
acgcaaacacatacactcgcaaacactcggcataaacgcttgcacaaagaaaaacggagaaaaaatttagcggtttcggtggaaaaaaaaacagtgaaaaatatatagttgaacgaacaagaacagacagcaacataccaagctagcgaacatgtctatcggagtgcccattaaagttctgcacgaggccgagggccacataatcacttgcgaaaccatcaccggcgaggtgtaccgcggcaaactcatcgaggcggaggacaacatgaactgccaaatgacccagatcacggtgacctaccgagacggacgcaccgccaacctggagaacgtctacattcgcggctccaagatccgattcctcatactgcccgacatgctgaaaaatgccccgatgttcaagaagcagacgggcaagggacttggtgggacggcgggacggggcaaggcggccattctgcgcgcacaggctcgtggcagaggaagaggcggacctccgggcggcggaaggggcactggtggaccgccaggagctcccggcggcagcggcggacgcggagcatggcagggaggaccaaccggcggtcgaggacgcggcggcctgtaggaactgcctactgaacaacgcatttctattctctaagttgcgggcatcatattattagcgggcgggtcgtacttctccagatgttttttgtaaagtatttatcgggcagagcagccgagaatacacttgaaacttgaatttg

SEQ ID NO: 35 - protein, 151 aa, Drosophila melanogaster
MSIGVPIKVLHEAEGHIITCETITGEVYRGKLIEAEDNMNCQMTQITVTYRDGRTANLENVYIRGSKIRFLILPDMLKNAPMFKKQTGKGLGGTAGRGKAAILRAQARGRGRGGPPGGGRGTGGPPGAPGGSGGRGAWQGGPTGGRGRGGL

SEQ ID NO: 36 - DNA, 2632 bp, Drosophila melanogaster
atggattacaaaaacgatattaattccgacgacgatttcgactgctccaacggctatagcgacagctatggctccaatggacgcatgtccaatcccaatggattgtcaaaagcagaacttagaaaggtgagttcgctcttttgcgatgaaattggactcgcaaactaaaaaatagcagagtttattagcaccctcgatcgttttgaaccttttcattttaatggcttagaaaatgtaaagcattaaattaattttaaaaatcaagtgaaacccttgttttatataaacaaagatatcccttaaactgaaataaattcctacgaaataaactaattgattccctttcttttctagaccaacaaaccgattatggagaaacgtcgccgagctcgcattaatcactgcctcaacgaactgaagtcccttatcctggaggcgatgaaaaaagacgtaagtatcttgcccgagcgtcaaagcagaaaaggagcggtccgcccgcgaattagaaactagcccccgatcccttttggttcactttcttataaataatgttagtccacaaaaaaaaacctttaaggcacaagtgtccgaagggcggcagaactacaaaagaacaaaaaaatgtataaaaaacgaactcctacgacacaagaactgaaaaaaaaaacacaaaccaagggctctaattgagtattaaattttattgatgatcattacactagagcgccgacgaggagtcagtcaagagaccaaaaagtgttaacaagtcgaggaattacgcagaaatcgccggagatgcgaacgaaaccagtttccaaggagtgatcctgctgtgagaaactacaaagcagaaatcaagtaaaatttgccgccgcagaattctgcaggagagccggaccaaaaatcaaataagaaagacattgagggaaaaaagcaaaagtaaacaaaaggttcagacaggggagcgggggaggttgagggggcggggctggcgagcgacctgcgtgggaaccttttgctaaaatatgcagtcccagcggcgagaaagggacgaacaatcggggaccgaagactggcgaagatcgcactgcgcgaaaaaagaagatcaggaagaacgatttggaatcttctgtgcccaaaaagtcttcatatgagatcacaaacgataagatcggcgagtagtttattttagaaccacttactaaagacagtcacttttccatcattagtattcacttgccagaaaatttgactttaagccccctttttgctcagtgcacagtagcaagatcagtcgttcttctcgctggagttgctgaatctcaccttggtcgtgtgatatttacagagtggactcgactgaagtggactgcagattacacgcgaatagttggacatatgaggcacgaaacgtgcttcttaacttcgctttttcccaagctattgaacttgttgtagggccccaaacaattagcccgaccatctcccaccccatccccatttcatcattatctgactttggttccttcgtcttctatacttttagccggctcgtcataccaaactggagaaggccgacatacttgagatgacggtgaagcatctgcagtcggtgcagcgccagcagctcaacatggccatccaatcggatcccagcgttgtccagaagttcaagacgggattcgttgagtgcgcggaggaggtgaaccgctatgtaagccaaatggatggcatcgataccggtgttcgtcagcggctcagcgcccatcttaaccagtgtgccaatagtctggagcagatcggttcgatgagcaacttcagcaatggataccgtggtggcttgtttcccgccacagctgtcacggctgctcccactccgctgtttccctcgttgccgcaggacttgaacaacaacagccgcacggagtcatcggctccggccatccaaatgggtggacttcagctaattccctcccgcctgccctcgggagagtttgccctcatcatgccgaacacaggttccgctgctccgcctccgggaccctttgcctggccaggatctgcagcgggagtcgcagctggaacagccagtgccgccttggccagcattgccaatcccacacatctaaatgactatacacagagcttcaggatgagcgcgttcagcaaaccggtcaatacctcagttccggccaatcttccggaaaacctcatccacacactgcccggccaaacgcagctgccggtgaagaacagcacaagcccaccgctgagcccaatctcctccatctccagccactgcgaggagtcccgggctgcctcgcccaccgtggatgtgatgagcaagcacagtttcgccggcgtcttctcaactccgccaccaaccagcgcggagacctccttcaacaccagcggatccctcaacttgagtgccggaagccacgacagcagcggatgctcgcgaccgctggcccacttgcagcaacagcaagtgagctccaccagcggaatcgccaagcgcgacagggaggcggaggccgagtccagcgactgctccctggacgagccctcgtccaagaaattcctagctggcgccatcgaaaagtcgagctccgcttggaggccgtggtag

SEQ ID NO: 37 - protein, 435 aa, Drosophila melanogaster
MDYKNDINSDDDFDCSNGYSDSYGSNGRMSNPNGLSKAELRKTNKPIMEKRRRARINHCLNELKSLILEAMKKDPARHTKLEKADILEMTVKHLQSVQRQQLNMAIQSDPSVVQKFKTGFVECAEEVNRYVSQMDGIDTGVRQRLSAHLNQCANSLEQIGSMSNFSNGYRGGLFPATAVTAAPTPLFPSLPQDLNNNSRTESSAPAIQMGGLQLIPSRLPSGEFALIMPNTGSAAPPPGPFAWPGSAAGVAAGTASAALASIANPTHLNDYTQSFRMSAFSKPVNTSVPANLPENLIHTLPGQTQLPVKNSTSPPLSPISSISSHCEESRAASPTVDVLSKHSFAGVFSTPPPTSAETSFNTSGSLNLSAGSHDSSGCSRPLAHLQQQQVSSTSGIAKRDREAEAESSDCSLDEPSSKKFLAGAIEKSSSAWRPW

SEQ ID NO: 38 - DNA, 1994 bp, Drosophila melanogaster
ggacaaccctatcgattgcttctagaaaagtcggcatttttcgcattttcacctggcacggcacatttcgcagcgtgttttattaaaaagtcgtacaaaaatacaggaaaaactgtaattcgacagcgctatcctctcccttatcagaaatggacaaggtgaacgaactcaaggaaaagggtaaccaggcgctcagtgccgagaagttcgacgaggcggtggcggcgtacacagaggccatcgctctggacgaccagaaccatgtgctctacagcaaccgttcggcggcattcgccaaggctggaaagttccaggaggcgctagaagatgcggagaagaccattcagcttaatcccacttggcctaagggttactcacgcaaaggagctgccgctgcgggtctgaatgactttatgaaggccttcgaagcgtacaacgagggtctcaagtacgatcccacgaatgctatactcctgcagggccgcatggaaactactgcctcggctctgagctttatgcaatcgcagggggatatacccatggacgttgatccccagcaggcacgcagccgcagggctccatcgccaccgccgaaaccggctgagcccccaaagcccgctgaacctcgggtagaggacatgactgaggagcagaagaataagtacttcgcgaggaaggagaaggaactgggcaacgccgcctacaagaaaaaggactttgaaacggccctaaaacactaccacgctgccattgaacacgatcccacggatatcacgttctataacaacatagctgctgttcactttgagcgcaaggagtacgaggagtgcatcaagcagtgcgagaagggcattgaggtggggcgcgaaagccgcgccgactttaagctgatagctaagtcctttgctcgcatcggtaacacctatcgtaagctagagaactacaagcaggcgaaggtttactatgagaaggccatgtccgagcatcgcacccctgagatcaagacctcgctgagcgaggtggaagccaaaatcaaggaggaggagcgaatggcctacatcaatccggagaaggccgaggaagagaaggagcagggcaaccttttctttaagaatggggactacagcaccgctgtaaagcactacaccgaggccatcaagcgcaatccggatgatcccaaactctatagtaaccgcgccgcctgctacaccaagctggccgcctttgatctgggcctcaaggactgcgacacttgcatcaagctagacgaaaagttcataaagggctacatccgcaagggcaaaattctacagggcatgcagcaacaatctaaggcgcaagccgcttaccaaaaggccctggaactggaccccaacaacgcggaggccattgaaggctaccgtcagtgttcgatgaacttccagcgcaatccgcaggaggtcctcaaaaacgcaatgtccgacccggagattcaacagatcttaaaggatccggctatgcgtatgatcctcgagcagatgcaaagcgatcccaatgcggtcaaagaacacttgcagaatcctgccatcgccgataagataatgaaactgctggagtcgggcatcattcagattcactaggcactccagatccacaaacgaacatcctcatacaatcactaactcacacacaaaccccattgataaacattcaggagagaaccattacgcattattatggcgtctctaagctggttaaccaatatatcgtttttgatgaaacgggccacaattaatgctaaacgtaattacctaagaaatcacatcgcctattcgcagaacgacgataactaccattaacagaaatttaaactaaaaggagaaaacaaaatcattgataaatgtctgcctaattgatttacgcagacgggtggagtaggctccaaacgtcatggtccttattttcttactacaataaatatgctgtagcttagctctaaaataaaaaaaaaaaaa

SEQ ID NO: 39 - protein, 489 aa, Drosophila melanogaster
MDKVNELKEKGNQALSAEKFDEAVAAYTEAIALDDQNHVLYSNRSAAFAKAGKFQEALEDAEKTIQLNPTWPKGYSRKGAAAAGLNDFMKAFEAYNEGLKYDPTNAILLQGRMETTASALSFMQSQGDIPMDVDPQQARSRRAPSPPPKPAEPPKPAEPRVEDMTEEQKNKYFARKEKELGNAAYKKKDFETALKHYHAAIEHDPTDITFYNNIAAVHFERKEYEECIKQCEKGIEVGRESRADFKLIAKSFARIGNTYRKLENYKQAKVYYEKAMSEHRTPEIKTSLSEVEAKIKEEERMAYINPEKAEEEKEQGNLFFKNGDYSTAVKHYTEAIKRNPDDPKLYSNRAACYTKLAAFDLGLKDCDTCIKLDEKFIKGYIRKGKILQGMQQQSKAQAAYQKALELDPNNAEAIEGYRQCSMNFQRNPQEVLKNAMSDPEIQQILKDPAMRMILEQMQSDPNAVKEHLQNPAIADKIMKLLESGIIQIH

SEQ ID NO: 40 - DNA, 1100 bp, Drosophila melanogaster
atcgaacagagctgccaactctatttttgtagctggccagccaggattgccagagtaagggcctcaaatcagctgttttgtgttttgattttattttgaaagtcctagtttaaaattatgctttctccgacagatcagcacaaataatactaataaagctcacaatgctaaggttgtgccttccaactcgagctggatatgtgcgtaagtaaggactttacggctataaaacttgttatgtaaagtaaatgaaagcctattgcgcagtttctcgaacgacaaaccaagaaaacccgaaacacactatgaagttttgaatattcgcaatgattgcagcacccgtgaagtccgtaatgcctttgtccagctctccaaattgtaagtaactccaagattccgaaaggagcctcctaaaccctgccctttccacaggtaccacccagatgttaagagcaatgctgcgtgtccggagcgcacagcccgatttgttcagatctccgaggcgtacaagaccctgataaagccggagcggaggagagactacgatgacagcctgctgtggcagccatcgcgctcggaccgcagtcccgttggcgagacggtcaatcccggccaggcgtgggatgtgaggcccaactacgatcccaatccaggaccgtactatggcatccgtggtctgaagagggtctccaactggcaggtggccgtggttctgatggccctaggcttcgtcggcgcactctttggcttcacctccgtcaggttaatgattatgaaccagagaacccaagtagtcacactgaactttcaccatcccaacaggtcgtcctttaaactgagtcgccagatccaggacgaaatctcagcagaggctaattcccatcatgccgccgttgtggccgatgcccagaagtacggcaacgaggagcaagtgcgtcgtatggtggaccgtatgtcgcggagtcctttcaaccagtcttcggctaagtaatcccatttccccatttcctttggtcaaattaaacgtgaaagcatatagctatttttgaatattttgttttggttcaaggcaaagcaaactcaagagcgattcgttaagc

SEQ ID NO: 41 - protein, 217 aa, Drosophila melanogaster
MLRLCLPTRAGYVRNFSNDKPRKPETHYEVLNIRNDCSTREVRNAFVQLSKLYHPDVKSNAACPERTARFVQISEAYKTLIKPERRRDYDDSLLWQPSRSDRSPVGETVNPGQAWDVRPNYDPNPGPYYGIRGLKRVSNWQVAVVLMALGFVGALFGFTSVRSSFKLSRQIQDEISAEANSHHAAVVADAQKYGNEEQVRRMVDRMSRSPFNQSSAK

SEQ ID NO: 42 - DNA, 142 bp, Drosophila melanogaster
tacgctttctctgtcaggctctcgcgctctcgttcgcttgctcctttctcgcggttcggttcggggtgtcacgtcaaaggtttgtcgtggtggtggagggttggcgtgtgggttgtcgagtggcgagacgattggcgggtga

SEQ ID NO: 43 - protein, 47 aa, Drosophila melanogaster
MRKRQSESARASERGKSAKPSPTVQFPNSTTTSQPHTQQLTALLTAH

SEQ ID NO: 44 - DNA, 1157 bp, Drosophila melanogaster
gaagcagagaccgtaatttttccacgactcaacctagcgattttccaagccatttgagccgcaattgagtctttagccagacggaaagcatttagagcgtgtgtaatagagtgcggcaacttgaaagcggtgcatcccgagaaatcgcagtgcgaaagggccccgaaaaccgctggcccagccccattataaacagtgaggaggggtggagattggtgagagcggagcggagcgagaagagagttcagcaaacccgtaattaagaaaaagtagacacgtacgttgaggaagatgtcatccggagattttggcaatccgctgcggaagttcaagctcgtcttcctcggcgagcagagtgtgggcaagacctcgctgattacacgattcatgtacgacagcttcgacaacacgtaccaggcgacgatcgggattgatttcctatcgaagaccatgtacctggaggatcgcactgtgcgcctgcagctgtgggatacggcgggacaggagcgattccgctcgctgataccctcgtacatacgcgactccacggtggcagtggtcgtttacgatatcaccaacaccaactcgttccaccagacctccaagtggatcgatgacgtgcgcacggagcggggtagcgacgtcatcatcatgctggtgggcaacaagacggatctctccgacaagcgtcaggtgtccaccgaggagggtgagcgcaaggcgaaggagcttaacgtgatgttcatcgagacaagcgccaaggccggctacaatgtgaagcaattgttccgacgggtggccgcggcactgcccggcatggattccacggagaacaagccctccgaggacatgcaggaggttgtgctaaaggactcacccaacgagacaaaggatcccgagggcggctgcgcctgctagaaccggttgagccgacgatccaaccatcctctccccctttttcaacagcaggagcagatgcagatgcaggagatcggccagcagcactggtgtacacaggtgtcaggtgtatgtactggccggatctgcggcggattcctcaacatctatacacacatacacactttacgtttaagtttatttataaagtaacaaatgatagcaaaggcaaatagactaaacaacaattaacgaaaaaa

SEQ ID NO: 45 - protein, 208 aa, Drosophila melanogaster
MSSGDFGNPLRKFKLVFLGEQSVGKTSLITRFMYDSFDNTYQATIGIDFLSKTMYLEDRTVRLQLWDTAGQERFRSLIPSYIRDSTVAVVVYDITNTNSFHQTSKWIDDVRTERGSDVIIMLVGNKTDLSDKRQVSTEEGERKAKELNVMFIETSAKAGYNVKQLFRRVAAALPGMDSTENKPSEDMQEVVLKDSPNETKDPEGGCAC

SEQ ID NO: 46 - DNA, 1323 bp, Drosophila melanogaster
acatgccgcgacgctatcaaacagctctcaattcggccaaatacagtgcccaggtcaagaccaaaactagtgacaacgaatccgattccgaagatgatcttccgccggatcaagatgctgaggataacaatgagccagataatctgcgcagcattttggaaaatgcgccgcacttctcttatcccggcttgaacactggaatgttgggccaactcttgtacgatcatcaggataatccgaagcaggacttgccaaattgctcggttacggtgccgctacccctcttcctggcaaaggatggacaaactccccgagtggaggcatgcgtccaaaggccattccgctacgacgattggacacggcaattgcaattaggcaaggctatatttgataggcgacttaaaaatatgagacagcgtgtacagaagcaggagcaaggtgtacacgatgccagtctgtttgagatggctgagcacatagcccaacaggagaattccttcttcagggacagctacgattactactacacaggcggaaacctaaacacgattccgtttgatggaaacgatcagctggccatgcatgtcagcggtaataagctcagagatttgcacttttcccgagattatggtgaggcggagttttggcaaccattgcattcggctacgatagaggaatcctccagcgaagtctttgaacttcttccgctccacaatttaaatcgcagtcaaatgttcctggcacggttgctgaaggaggtttccctatacgaacttaaatgcaaagacgaacaggattcggattcagattacgaactcattcgccattgcatgtttagcagtcaagtagctccttttacaagcgctgcacaatcattggccaatgccaatacattggccttagctagccaggataggtctttgcgcttcgtggatatttcgacacaacaggatatagccaagcttgatgtttgcttgctaaaaggactgaagaaaacctcgagtacctgggcacagttaaagcaagcagaggaaagcacctttcactgcctaacacagccagttttgtttaccgtagatgtgcgatgcaatctgcctctgaatccctgctttgccagcggcgttcactcaaaagcttgcgagaggttctcttgtttggccaagggtgtgaatcctaatctcttgtatgtggctagtaatcacaacttccactgtttggatatcagatgcttgggtaaaaagctgaccgatcgagctgtcgtcacctggacgcatcagatgacctatccaccctgttttattgacacaagcgttcaccaggaca

SEQ ID NO: 47 - protein, 440 aa, Drosophila melanogaster
MPRRYQTALNSAKYSAQVKTKTSDNESDSEDDLPPDQDAEDNNEPDNLRSILENAPHFSYPGLNTGMLGQLLYDHQDNPKQDLPNCSVTVPLPLFLAKDGQTPRVEACVQRPFRYDDWTRQLQLGKAIFDRRLKNMRQRVQKQEQGVHDASLFEMAEHIAQQENSFFRDSYDYYYTGGNLNTIPFDGNDQLAMHVSGNKLRDLHFSRDYGEAEFWQPLHSATIEESSSEVFELLPLHNLNRSQMFLARLLKEVSLYELKCKDEQDSDSDYELIRHCMFSSQVAPFTSAAQSLANANTLALASQDRSLRFVDISTQQDIAKLDVCLLKGLKKTSSTWAQLKQAEESTFHCLTQPVLFTVDVRCNLPLNPCFASGVHSKACERFSCLAKGVNPNLLYVASNHNFHCLDIRCLGKKLTDRAVVTWTHQMTYPPCFIDTSVHQD

SEQ ID NO: 48 - DNA, 3927 bp, Drosophila melanogaster
tcagttgaaagtgaacccttcgacggcagttgacacggaatcgcgcgcgacttcgttccttaagtgtttttcagcaggagcaggaaatcctggaagctgaagccaaaagacccagcaggacatcagctgtgccagcgaaaaggattctagctgcaagataatagttatttgtgcagtgtgctaacctaaaagcaagcagttctcagactgcaacgaactaaaacaaagccaagtgaataaactaagccaataagatataaaagtgaaaaaactttaaggataataaaaccgaaaacgatcgctcgtcacatgagttccagtgctggcgcagatatttggcgaaaataaatttgcaccttggacaagcggcagagaaacaatgataattagtttgttcggtccagcaacaaatagctgtgcaatagaaattaattagaaaatatttcgcgtaacacagcagcaatttgtcaagggggcaaagaagtgcgctacacatttggtgcttgcggtcctttgctcaatttctaattagagagctcgaaaataaactggaaaactggaaattaaacaaagcggcaaagcgactatgcaaagtatgttggcgcttaaccaaatgaaaacttaacgggccaaagtaaaacaaaaaaaaaaataaaaataaaaaaacggaacagcactttgcaacagctccacagctccagtaaacttaataacaaagccggcgaaaatagtgaagaactccggaacctagaaactccacatcatacgcgccgagcgcggaacaatgaatataatttcgcgcagcatacgtacaggcgccttggccccgcccaccactgcccacgcctccgccaacgccagcgggctcaggaaaagcagccagcgacgcaaccgtgctccgcttcaaatgaattgccccattctgattgtaattagcctcggatggctgctgcacgcgcacgccggaagcggcgggttcgccgtcgaggccgccatttcaaatcgaggcagcaacagccgctcgatagcaacgtgcaacagtcggcggtgccgcctccacgctgaccgccaccctgccccgtttcctctccagaggacacacctaccgcgccgtcgtcggggacacgctggtctgccctgccaggtggagaatctgggcaatttcgtccttctgtggcgacggggaacaaatgtgctcactgcctccaacattatggttacaagggatgagcgcgtaagactgatagatggttataatttagagatatccgatttggagcctcaagacgccggggattatgtttgtcaaatcagtgacaaaataaatcgtgatcaagtgcacacagttgagatattggttccgcccagtgtacgggccatcccaacatccggacaactgcaggcccgcaaaggaggacccattacgttggagtgcaagggatctggtaatccggtgccatccatttactggaccaagaagagcggcgcaaacaagtcaacggccaggatcggagacggacccattttgacactggagaagctggagcgacagcaggcgggagtctaccagtgcaccgccgacaacggagtgggtgacccggtcacagtggatatgcgactggatgtgttgtatcccccggatatacaagtggagaaatcctggatacactcgggcgaaggattcgaggcgaagctcgtttgcattgttttcgctgatccagtcgcaacggtgtcctggtaccaaaactcatttccgatccaatcgacggacaggcgcatcatggccaccagagccaaccggcacatgctcaccatccgccacatccagcaggaggactttggcaactacagctgcgtggcggacaattcgctgggacggtcccgcaaatacatggagctctccggacgccccggagccgccgagttctattcgcccaagtggggtcgttcgccggacagctacaatctgacctggaaaatcgatagctacccgccgctggaggaggtccgcctactttatcgtcgagtgcagatgaatgagacttaccagcagccgggcaggtggcacgacttcatcctcaccccggagcaccgaccagcctcggagccacttacacacatcatgtcctacaccataaagaatctgcatccgggcggttactacgaggcgattgtgcaggccaagaatcgctacggctggaatgaggttagcgatatatttcaatttgtcgtcgccaccaacagccaggacattggccccgaagacgccgaggtggtggccagctccaagtcgcgcagcaatagtgcctccataggcagcctgccgggatccacagttcttcacacggcgcttctgttggccctggcttgagtaattgtcagttcgacagacgccgccttggcctgggataagcagttgatgcgcagacgatcgggatcaggatcaaaatcaggagcagcacaagacaaggggaaacactcgcacttggagtaggaagttgacggggaagggcggtagcataaagtgtatagaactccagaagaagaagtatagaagattttattgtacacctaacctgtcaaaaccgagaaagcaagtgaatccagcccaaaactaagcaacaaagatgaatggagattgcaaaccaaaaagctgaacgaataacccatgtaaataatttttcaagagttttgtccacgattaaattagcacacacccactcacacatacagccggaaaatcgttaatggaaattgcaattggagactgcaaatccgaattcgttttcggttttggcctcgttcgatcgacatgctaagtacagggagttgtgtacgagttcgagttgtaggccgcgctatcaaatatacaagtgacccatgacctctattgtgtgccctaaatgaaacagtacggattcggatcgtacaattggaaggtgcaaagctgataaatgcctgctgggttcgtaacactcaatattatcacgtatttattatgtatatttacagattgacacgcgtgacatccacgtgccgctaatatgtatgcaaagattcacattcaaatactctgaataatatgccgatttcgctttcgattctgattttgagtggggtattagcttatttgcgtcatgatgtttcgacctttcgccattctttttggtggtacaacacgtttgcttaaattctaatttacatcgaaaaacattacattgaattgctgttacgtttgttatccttttttggttatgggtgcgcttactggctaaaataagactacaactgcaatcgaaaaagtggcaatagaaatgaaataaactcgaatatgaaacggaaatgtggcaaatactttacatacaacattttgccgcgtgtgtgttctctttcccccctctgctttatttcatcttcaatattttgttatttatggtttcgctcgaaactaaataatatcactatataatatttgcttaatttacatacacatcctgcgcatcctgcacatcgggccgcatcagcccaacatttatgaagtaaaatgcagttcacattcagatatctaatgcttatttacatgacctagttcgacttgcttattctaccatgggaatggaacgggggtgggctttggatggtggatttgaattcactttttatgaacacgtaccggtcacgtgcttagctatatctgtttaatctgaattatactggtatttagattcaggctggatccttttcggacccctcctcatccccctcgtcacctcgtccttctctcatctatgttatctgtagtaatgcctccgattcgtcctgcattcaactggctatgtaaggtacacacacacatacacattatgtagataattgtaacgctttacttggttttcaattcgactcgacacttggatttttgaattc

SEQ ID NO: 49 - protein, 528 aa, Drosophila melanogaster
MNIISRSIRTGALAPPTTAHASANASGLRKSSQRRNRAPLQMNCPILIVISLGWLLHAHAGSGGFAVEAAISNRGSNSRSIATCNSRRCRLHADRHPAPFPLQRTHLPRRRRGHAGLPCQVENLGNFVLLWRRGTNVLTASNIMVTRDERVRLIDGYNLEISDLEPQDAGDYVCQISDKINRDQVHTVEILVPPSVRAIPTSGQLQARKGGPITLECKGSGNPVPSIYWTKKSGANKSTARIGDGPILTLEKLERQQAGVYQCTADNGVGDPVTVDMRLDVLYPPDIQVEKSWIHSGEGFEAKLVCIVFADPVATVSWYQNSFPIQSTDRRIMATRANRHMLTIRHIQQEDFGNYSCVADNSLGRSRKYMELSGRPGAAEFYSPKWGRSPDSYNLTWKIDSYPPLEEVRLLYRRVQMNETYQQPGRWHDFILTPEHRPASEPLTHIMSYTIKNLHPGGYYEAIVQAKNRYGWNEVSDIFQFVVATNSQDIGPEDAEVVASSKSRSNSASIGSLPGSTVLHTALLLALA

SEQ ID NO: 50 - DNA, 1491 bp, Drosophila melanogaster
atgaaattcctgatctgtgcacttttcttggcggcgtcctacgtggccgcttccgccgaggcggaggtcaaagttgaggagggtgttctggtggcgacggtggacaacttcaagcagctgattgccgacaacgagttcgtgctggtcgagttctacgccccatggtgcggacactgcaaagctctggctcccgagtacgccaaggctgcccagcagctggccgagaaggagtcgcccatcaagctggccaaggtcgatgccaccgtcgagggtgagctggccgagcagtacgccgtccgtggctaccccactctgaagtttttccgcagcggctctccagtggagtacagcggtggccgccaggccgctgacatcattgcctgggtgaccaagaagaccggcccaccagccaaggatctgaccagcgtcgctgatgccgagcaattccttaaggacaacgagatcgccatcattggattcttcaaggacctggaatcggaggaggccaagaccttcaccaaagtcgccaacgccctggactcgttcgtctttggtgtgagcagcaatgccgatgtgattgccaagtacgaggctaaggacaatggagtggttctgttcaagcccttcgacgacaagaagtccgtgttcgagggtgagctgaacgaggaaaacctgaagaagttcgcccaggtgcagtctctgcccctgatcgttgacttcaaccacgaatctgcttccaagatcttcggtggctcgatcaagtcgcatctgctgttcttcgtgtccagggagggcggccacatcgagaagtacgtcgatcccctgaaggagatcgccaagaagtaccgcgacgacatcctgttcgtgaccatctcgtccgacgaggaggaccatacccgcatcttcgagttcttcggcatgaacaaggaggaggtgcccaccatccgtctgatcaagctggaagaggacatggccaagtacaagcccgaatcggacgatctgtccgccgagaccatcgaggcgttccttaagaagttcctggacggcaagctgaagcaacacctcctttcccaggagctgcccgaggattgggacaagaaccccgtcaaggtgctggtatccagcaacttcgagagcgttgccctggacaagagcaagagcgtgctggttgagttctacgccccatggtgcggacactgcaagcagctggcccccatctacgaccagctggctgagaagtacaaggacaatgaggatattgtcattgccaagatggactccactgccaacgagctggagagcatcaagatctcgtccttccccacaatcaaatacttccgcaaggaggacaacaaggtcatcgacttcaacctggacaggactctcgatgatttcgtcaagttcctcgatgccaacggtgaggtggccgattccgagcccgtcgaggagaccgaggaggaggaggaggcgcccaagaaggacgagttgtaa

SEQ ID NO: 51 - protein, 496 aa, Drosophila melanogaster
MKFLICALFLAASYVAASAEAEVKVEEGVLVATVDNFKQLIADNEFVLVEFYAPWCGHCKALAPEYAKAAQQLAEKESPIKLAKVDATVEGELAEQYAVRGYPTLKFFRSGSPVEYSGGRQAADIIAWVTKKTGPPAKDLTSVADAEQFLKDNEIAIIGFFKDLESEEAKTFTKVANALDSFVFGVSSNADVIAKYEAKDNGVVLFKPFDDKKSVFEGELNEENLKKFAQVQSLPLIVDFNHESASKIFGGSIKSHLLFFVSREGGHIEKYVDPLKEIAKKYRDDILFVTISSDEEDHTRIFEFFGMNKEEVPTIRLIKLEEDMAKYKPESDDLSAETIEAFLKKFLDGKLKQHLLSQELPEDWDKNPVKVLVSSNFESVALDKSKSVLVEFYAPWCGHCKQLAPIYDQLAEKYKDNEDIVIAKMDSTANELESIKISSFPTIKYFRKEDNKVIDFNLDRTLDDFVKFLDANGEVADSEPVEETEEEEEAPKKDEL

SEQ ID NO: 52 - DNA, 1048 bp, Drosophila melanogaster
tactttaaaaagcaacgtgagcgagagaaacgcacggagccgagagaacggaaccggttcctactacttataacggtcttgtgacattagtggcgtacgagatgcagtcggaaaagcccactcatttctctcgcggagattctctctcaccgattagacacaacaacgaaaaacatagaaacattttgtattattatttttgttcgcgagtgcccgaaaaagtgtccgttctcattcactttatatctaacctacataaagacgtgatagagtctaaagcacttttacttgtgaaaggttaagaatgacgtaatgccgggaatgtaataataaaatttctatgtttatgtttaagttttaagataacggaacaaatcataccgtgatggatcaatccttggtaattctgatacagtaatgataacctacacgaagacgagaggataagattctcacactagaaataataaacgaaaaaggggcatcggttgaggtaaacattacgggcaaaacgaccgtaactggtataactcgggctctaggtcaggatgtagttgcggttgaaccggttcagcatgctgatggaggacgaccggtgggtgaagttgaggatggtcttcttggcggggccgaaggtcttcgacatggtccctgagagcctggcgaggaagctcctgtcgtaacgggactagttcgtccactgggcagcgcctccttagcaactgaagttgtgggcggtgctcagaaggccgaggcactcgtggttcgcgccgtgagaactccagctgcttgacgtgagggaccgagaccgagacctgtggctcttcgtcgaccggtggcctcggtgagtgcacgtgagggcacggtgggtgcggtggctgcggctctccctagggctcgaccgggtgatgaagctcctcttgaaggacccgttcgtccggctctcgcacgcgttcgacaggccgatacggttgctggagcggttcgactacttccaggggctgggtagggacaggcagatggacaagctgctcatagacgtcttcgt

SEQ ID NO: 53 - protein, 226 aa, Drosophila melanogaster
MKFFVALALFACLGSLALAKDDEYCQNTVITACSTSAFSANSICNARFAGIDHIEPEIQSYINANLAKSYDYLLLATHFNSYQKNRPGFQKLYQGLSDRSFEDSIALIKQVTRRGGIVDFNTRHESSGSVSTKRGTLEVDELHSLALALDTEKQLATGATHVHSRATHATDAERDPELAHYFEENFLGKQAESVRKLSGYANDLAKLMKVPDPSLSVYLFDEYLQK

SEQ ID NO: 54 - DNA, 2936 bp, Drosophila melanogaster
gaggataaatccgtcattagcataaccgcattgaagctaagtcttcgggaaaatgcttaagcttgtgcaatacatagccccccgggtgggcggcgccacgccccgaccgactgcctgcggctggggcaacttgctattgatttccccgagaagtggcgcgagctccgagaaatgtataacgcaacgtcgccattttcttttctcctccgccagcagcagcgcactttcgcttcttcttcttcgctctgcaccgaacaacgacaacagttccacggagtcgcaggaatcgtgagacaatactgttcccaagcacatatagtagtctccaagctcagtgccagcgtgcgtttcgagacagctcgaaaccagattcagacgctaacgtagattccatcccgaaagcagagcagcggacgaggacgaggaaatcgcttttcaacgatcccgacgaaagaactgaggaaatcaaaattgaaggagtaatggcaccacacgatcgcgactttggtcacagtggacgtggcggtcgcggaggcgatcgaggcggcgatgatcggcgaggaggcggcggcggaggcaatcgcttcggtggcggcggtggcggtggcgattaccacggcataaggaatggagccgtcgagaagcgacgcgatgaccgcggaggcggcaaccgatttggaggtggtggtggattcggggatcgccgaggaggaggtggcggcggcagccaagacctccccatgcgtccggtcgacttctccaacctggctcccttcaagaagaacttttaccaggagcaccctaacgtagcaaaccgatcgccctacgaagttcagaggtatcgcgaagagcaggagatcaccgtgcgcggacaggtgccgaaccccatccaggacttctccgaggtccatctgcccgactacgtcatgaaggagatccgccgacagggctacaaggcccccaccgctatccaagcgcagggctggcctatcgccatgagtggctcgaacttcgtcggcattgccaagacgggatccggaaagaccctgggctacatcctgcccgctattgtccacatcaacaaccagcagccgctgcagaggggcgacggacctatcgccctcgtgctggcccccactcgggagctggcccaacagatccagcaggtggccaccgaattcggttcctcgtcgtatgttcgcaacacctgcgtcttcggcggcgccccgaagggcggccaaatgcgggatctgcagcgcggctgcgagatcgtcattgccacacccggacgtcttattgatttcctctccgccggctctactaacctgaagcgttgcacctacttggtgctggacgaggccgatcgcatgttagacatgggcttcgagccccagatcagaaagatcgtctcacagatccggcccgaccgacagacgctcatgtggagcgctacctggcccaaggaggtcaagcagcttgccgaggactttttgggcaactacatccagatcaacattggatcgctggagctgtccgccaatcacaacatccgccaggtggtggacgtttgtgacgagttcagcaaggaggagaaattgaagaccctcctgtcagacatctacgacaccagcgagagccccggcaagattatcatattcgtggagacaaagcgacgcgtggacaacctggtgcgcttcatccgcagcttcggagtccgttgtggagctattcacggtgacaagtcgcaatcagaacgagactttgtgctccgtgagttccgctcgggcaagtccaacattctggtggccaccgatgtggcggcccgtggactagacgtggacggcatcaagtatgtcatcaactttgactacccgcaaaacagcgaggactacatccatcgcatcggtcgcacaggacgatccaacacaaagggcacctctttcgccttcttcaccaagaacaatgccaagcaagccaaggcgctggtcgacgtactccgagaagctaatcaggaaatcaatcctgccctggaaaatctggcccgcaactcgcgctacgacggtggcggcggaccgtcccgttatggaggcggtggcggcggcggtcgcttcggcggcggcggcttcaagaagggcagcctgagcaacggacgaggcttcggaggaggcggcggcggcggcggcgaaggcagacactcgcgcttcgactagatcgcgacaattagatgagcagtaaagaagctataggaacaggagattcagtagctaaactaaaccgcactaggtcctaagttaaattaagttcatagcttaagttaagatttcgtactactttcaccaaaccgctgacggttattcttagacttaaattcagactccctgattaatgaaacactacaaaatgcgagctatttgaacatagcgaatttatgtttaaagatttgtaagttatttgacgctggccgcgaggtcggtacaacacaatccaattgagaacatcaaaaacactttacttaaacgtgggggttggaaaatgggagatgagagataatttcttaatttaacgtggtgtatcactaaactaaaagcaaagggggatgtagcgaggagtacgttgatgtagtggaggaaaaggaggaagtaaggatcattcccgtctgtcccgttttgatgacaatgaacaaaggctgacctgacgagcgacctttgtttgataaataaattcttcaaattacttttggaaaattaacttttggataccttttatggctcaacacgagaacaagaatgtgtaaagcaaacaaagcaaacgggaaatcacattaactactgacactaaatacaaaagaaaaacaaactgtatgtacaagatgagaagttctctttcaatttaatttttcggaaaaaaataaagtttgtgtatacctattacaacct

SEQ ID NO: 55 - protein, 575 aa, Drosophila melanogaster
MAPHDRDFGHSGRGGRGGDRGGDDRRGGGGGGNRFGGGGGGGDYHGIRNGAVEKRRDDRGGGNRFGGGGGFGDRRGGGGGGSQDLPMRPVDFSNLAPFKKNFYQEHPNVANRSPYEVQRYREEQEITVRGQVPNPIQDFSEVHLPDYVMKEIRRQGYKAPTAIQAQGWPIAMSGSNFVGIAKTGSGKTLGYILPAIVHINNQQPLQRGDGPIALVLAPTRELAQQIQQVATEFGSSSYVRNTCVFGGAPKGGQMRDLQRGCEIVIATPGRLIDFLSAGSTNLKRCTYLVLDEADRMLDMGFEPQIRKIVSQIRPDRQTLMWSATWPKEVKQLAEDFLGNYIQINIGSLELSANHNIRQVVDVCDEFSKEEKLKTLLSDIYDTSESPGKIIIFVETKRRVDNLVRFIRSFGVRCGAIHGDKSQSERDFVLREFRSGKSNILVATDVAARGLDVDGIKYVINFDYPQNSEDYIHRIGRTGRSNTKGTSFAFFTKNNAKQAKALVDVLREANQEINPALENLARNSRYDGGGGPSRYGGGGGGGRFGGGGFKKGSLSNGRGFGGGGGGGGEGRHSRFD

SEQ ID NO: 56 - DNA, 2280 bp, Drosophila melanogaster
acttcgttctcagttcgtcgtcgagtcaacagctcttcttgttcagcctttcggttcctcgttcggtgaattgagattgtgcggttcaaattattaaagaaaaggaaaaacctcgcacaaccacactccgaaatacaaaacaaaaaatcatgctcaaacggacacattaacaaaaaaaaaaaaaacaaaaaaacctaaattaactaaaatgcaatactagccaaaaaccaaggactaccatctcaaattctaaaaacaaactgtaaatgagtgcagagtgaccaagaacaaattgtgttttagcaatttcttcggcttcagactcgccagcgaaatcaaacatcttcggctcttcgaagcaaccaacgcaacacacaacaaaaccaacaaaatgctgtgggaaactattgtggaggaaaacaactgcagcatggattgcaatatcagtaataacaccagcagttcgagtagcatcaacaaaatgagtggatctcgtcgtgctcgccgttccctggaactgatgagcatggaccaggaggagctgtcgttctacgacgacgacgttgtgccccaggatcagcagcgatcggccagtccggagctgatgggtctgctctcgccggagggctcgccccagcgcttccagatcgtccgccagccgaagattctgccagctatgggagtatcaagtgatcatacgccggcgcgcagcttccgcatcttcaacagcctgtcctccacctgctccatggagtcctccatggacgatgagtacatggagctcttcgagatggagtcgcagagccaacagaccgccctgggcttccccagtggcctgaactcgctgatcagcggccagatcaaggagcagcctgctgccaaatcgccagcgggtctgtccatgcgccgcccttcggtcagaaggtgcctcagcatgacggagagcaacaccaacagcaccaccaccccaccaccaaagaccccagagactgcccgggattgcttcaagcgcccggaaccgccagcatcggccaactgctcgcccatccagagcaaacgccatcgctgcgccaccgttgagaaggagaactgccccgcacccagcccactcagccaggtcacgattagccacccccctccactgaggaagtgcatgtccctgaacgacgccgagatcatgtccgccctggcccgctccgagaaccgcaacgagcccgagctaatcggcgacttcagcaaagcctatgccctgcccctgatggagggtcgtcatcgggatctgaagagcatctccagcgaaacagtggctcgcctgcttaagggcgagttcagcgataaggtggccagctaccgcatcatcgactgccgctacccctacgaattcgagggcggccacatcgagggagccaagaacctgtacaccaccgagcagatcctcgatgagttcctcaccgtccaacagactgagctgcagcagcagcagaacgccgaatcgggacacaagcgcaacatcattatcttccactgcgaattctcctcggagcgtggaccgaaaatgtcccgcttcctgcgtaatctggatcgcgagaggaataccaacgcctatccggcgttgcactatcccgagatctatctgctgcacaacggctacaaggagttcttcgagtcgcacgttgagctgtgcgaaccacatgcctaccgcaccatgctggatcccgcctacaacgaggcctatcgccactttcgcgccaagtccaagtcctggaacggcgatggcctgggcggtgccaccgggcggctaaagaagtcgcgctcgcgactgatgctgtaggttgtgggatgatcgtgcagttcgttatctaagtttgggtgttatcgtattgtatatatagacgtataggggtatttatttcatgctgcttttaagttgatttttgttgattttcatttgttaatccgtagactaagtttctcgcacacgacgcaaacacacacccgacactcgcattcatgcaaaacagacaatttcatttggaatttaacgcttttgtttagttattattgtttttatggtttcggctttagttcaattatttaagcactctagttcaaattttaaagataaccaacgaacaagcaaacgaaaaatgtgcattataatctaaaaacgtgaggaaccatgtcatttaaatttaagaggccgatcccgaaatcagaccccttaatcatttgtagatgataagcagaacaaaaaatggctaaaaacaaaaaaaaaaaaag

SEQ ID NO: 57 - protein, 479 aa, Drosophila melanogaster
MLWETIVEENNCSMDCNISNNTSSSSSINKMSGSRRARRSLELMSMDQEELSFYDDDVVPQDQQRSASPELMGLLSPEGSPQRFQIVRQPKILPAMGVSSDHTPARSFRIFNSLSSTCSMESSMDDEYMELFEMESQSQQTALGFPSGLNSLISGQIKEQPAAKSPAGLSMRRPSVRRCLSMTESNTNSTTTPPPKTPETARDCFKRPEPPASANCSPIQSKRHRCATVEKENCPAPSPLSQVTISHPPPLRKCMSLNDAEIMSALARSENRNEPELIGDFSKAYALPLMEGRHRDLKSISSETVARLLKGEFSDKVASYRIIDCRYPYEFEGGHIEGAKNLYTTEQILDEFLTVQQTELQQQQNAESGHKRNIIIFHCEFSSERGPKMSRFLRNLDRERNTNAYPALHYPEIYLLHNGYKEFFESHVELCEPHAYRTMLDPAYNEAYRHFRAKSKSWNGDGLGGATGRLKKSRSRLML

SEQ ID NO: 58 - DNA, 4934 bp, Drosophila melanogaster
tactaggtgcagccgctcttgagcaccttagacgcctagaagtagtgcctagaccgcgacctcttctgctacgcgcacgcgccactggtcgtgtaacccccgtaatacgacgttgaccacctaggcctcttagggttcctgaccagcctagtacgagacaccaccggtcgcgccttacaaaccgagtcggcttggtttgaatgggacctagtcacgccacaggtccgcctatcggaagacgtgaagtgcgggtacgtgttctatgacgcccacgtcgacggcctaaactccatggacctgagggcccacctaatgaggcatttctgcaagagccgccaccaattagatacgttcgtcaacctataggcgataggcctcctcaacagggacacgtttggtgaccttcgcctcgtggacttcgcattgaagcgggtccacggcgtagtcttcgctcacggttagcgacttggtctaccgtggtgaatggacgtcggacgacgcctgtggttgagtaaacacgggtagtcgtgcagcaaagtacctcttccgccttcgtgcccgtcagacctgttcgggagacgtggccctaggaagaagacacgaggagacagcggcgtgttagtggctcgcgcgagcggtcacgcgtggcatagtggaaaaggtccgtggacctttgtctcggtcgaaccgatacggtgcatgctaagctcgaggagttcagaaccgctaaaggtcctcttaaaccggtcgagaggcgggtggggtacgcgcctacacgctcgagaagtcgacgcggggttcagcgaccacctcttccgagcagacttacacccgaccgatctaaggagcgacaggtagtaccttgtcccgtatgcgctcatgctgtgcgacacggacgcgaagttcataaagtgaaaaaagctagatttagggttcacgctggtccacgcgtagttagtcgacatgctcgtccggttcacctcacaagacttgctcctcaacctaacgtgtctcctcctctcggaatacaaacggcgggaggtcaaggtccacttggtagtgcatctagtatgtggggtcccacgtcgtcacctgagcccgtaactttgaaggtcagtcctcttactgttgcttctgctctaactaagccgtgactttctcgatgtctaatgcgacctccctggcctgatgccgcctctgagcgccttataatgtgcgtatggtctcgagagactgataaacgcaatgaacttcggcgtttctaagtgcgacgcgccgatattcgcgatgatgaagtggatagccctagacgtaaacgtagacaagttcttgcggcttctaagcgctgcacaacgcggacggtattcgtaattggacttcccgacgcttcattgaggcctacatttggacagggtccctttcatacgataggccgacctccagagaggactaccaccggtgccatagttgtcactccacacccacgcgacgctcttgctcgtcgtcatgcggttcacctaccgacgaacagcaaaccgccggttcccttctagggaccgcctatcgagcatgctctcacttcacctgtcgtatgagagcgatgacgtctacgtcgctgggcgtgtgcctcaagtacatttgtagctaggagcgagacaccttcgtcaactaatagacagcgggttctagtaggcgttcaacagcttgttccgtcaggtcgcctaggagcttcgtgtacggttgcaagccctcgacttacgaaatctaagttttgacttcatgtaggtccgtaccgcaagcaatggactgaaacctcattcggacaagtagtaattcaagctgcccgtagccttcctcctcgacgagccgcaccgggtgttggcgtaatacgcgtacctagactcaagccctctagtgtagttctggaccgctatattgtggtacttccgcaccttgcagttgaccttgtatttcacgtactactaagtcaaacttctgctcttacaccagaagaggacggtgagtcggctgacatttcaccacgtgctcaagtagccaccaatgtaaaagtacaggtacgctaggttcctgtggttggtctgggacttgctcctcgaaaaggtgtttgaatggccgccgaccaggatcatggtaaataacgagctaaaattaccgtccgtcaaagttaacaagcttaaaacaattctatttggtgacaaaattgactattggttgactatctgagtgttgaagttacgttatgtacataaattaaagtgaaataaatggaaaattgagcaacaattgattagaacaactactaaaaagtggtgcttttagcgaacggttaccggaaaaacggacgggttgtggattaatctgaattggcaccggaatcgttacaaaaacatattgattgagaattcacatataaatttatttttagggtataattttaagttgataacgaacccataacctgaaaagcccctgtgatcatctaaaaaactccaattttataatttaatgactccagtcatttccagtaattttctcattaaatgactatcaggtttttataatttgaacaagtcattttgtaccgttaattttcaattcattttattaataatccatggttcacctagtttctggttccttttgacacctagcgctttattcaaaattaaatcttgataatgatgaactttcttaatgataactaactttttcaaaacttggcttaaagataccgtaattatctaaactctaaattttattataacagttttacatagtaaattttaatgcgccatagctaactatttgaatatagcacttcgaattagctaatcgagagctattaaaccgcggtcgaaacaacttaacagtacctttgctttaatcgtaaagctgtaactaaagggtaattttatgtcagagatttaatttcattcatataaattgaacccgacgtctagttttcacggtctaagacgtcattaatcctatacctcttttgccttttatgatttttaagagcgtggtggatgcttcacgtttccctaaaaccgaagtcgtcacccgacgcaagcctttaataaaccctaagcatacaatacgttaatgaatttagtagcatggaccgatttgatataaatatgggtgtctgatcggggcctagtcccactacaagatttcgttttctatctcttggagtaagcgctactactgcgggcgttaccgttccgctaagttgctttcgccctcgtcgaaaaggccttataaaccgtcgtcgcgacaatgtggttgccgtgtaacgagaggcggtattaaatgcacgatcagtgcggcctatgtctgggccttagccgcgacgtcagatggttgatgaggacagtgggccaaaaagcgtgtgccgcgacaaacttcccgctcttgtcgcggcgaacaacgtactaaaaacacctgcttttacgtgcccagatgcggttaaccctcgtcaagcagaaggccttgtggaacgggttcccgaactactagcggggatcggttccttaaatgtgtaagtggccgctgctcctcggcccgcaggtcaactaccaggtaggttgcggtcgtcgtgcacggtccatattttaagacttacgaccgctatttcagcggtgacaaccatcgaaccaccggtcacaaggccgccgacgtcgaaaccgacacggagacccgcgaggcgagcgctaacggcggtggcgacacccgcaccggtggcctcagatgtcgtgggacgcgagacggagggtagaatagctagcagctgccgtgcctgtcaggtggacgtagtgcctatggctccgtgcgtcgagaaccaacccgcatcgtccaccgcaacacccagatcctcggtcaccccggtgttttcgagacaggtggcgacgtcctcgaccgatgtttcaattagggcgacgcgtcaatcggcaatccccctatttaccacggagttaccagtagcggccttgcccacatcgcttaccacaaatgctaaatataagccattcaacctaggaaattttttctgtaattaaaatattgaagcaaagctggaggagtctttgtacctctactggttcggtatttgtcgaacctgtacgacttctaccggagcgtggaacactataagtgagtaaggtagttgttatacgcgtagcgaaggttccgatggttgcccagaaggaactccgctcgtgaagctttagttaggtccgttcagttatggaggaccgtcagtgtatatatcataagaagtagtaaaaacatagttgtctttttagaaactagcttagagggtcctttgtcaattcgacgtgttacttagaccagttaaactataacactcttgggagttgctttagggaaaattcctccatgaggagtcagaagtgttatacttgagtgtggattcagtccctgaatgtcaccggtggtgaaataacggggtttatgactcaatgccgtaaccgcccgtctaccactagttatacctgtacgagcgtgtcttcaagccgccttttaagcaactcgtatagccgttagaccgatcgaaatgcctgcaaaacctccggtaccggtctatgaagtcgctagtccgacatgtcgaagattacgtctactgggcgtgtaagcatctcctcttgcacctaatgtaactagcgagcgacttatgcaagcatagttgacttcgccaggagatagcgtaagattacgtaacgcaattttggaaactactgaagccgcttctaaaggaagtctctgttgcactcctataaaactaccaccataggttcatgaaagctagtgacctcggtcaaccgcttgttttgacggcgttcatgtttacgttgcaaacgtttccgcggatgatataatcaaggtatatt

SEQ ID NO: 59 - protein, 1248 aa, Drosophila melanogaster
MIHVGENSWNLRIFITDLALEKTMRVRGDQHIGGIMLQLVDPENPKDWSDHALWWPARNVWLSRTKLTLDQCGVQADSLLHFTPMHKILRVQLPDLRYLDSRVDYSVKTFSAVVNLCKQLDIRYPEELSLCKPLEAEHLKRNFAQVPHQKRVPIAEPDGTTYLQPAADTNSFVPISTSFHGEGGSTGSLDKPSAPGSFFCAPLSPHNHRARSPVRTVSPFPGTWKQSQLGYATYDSSSSSLGDFQENLASSPPTPCADVRALQLRPKSLVEKARLNVGWLDSSLSIMEQGIREYDTLCLRFKYFTFFDLNPKCDQVRINQLYEQAKWSVLNEELDCTEEESLMFAALQFQVNHHVDHTPQGAAVDSGIETSSQENDNEDEIDSALKELQITLEGPDYGGDSRNITRIPELSDYLRYLKPQRFTLRGYKRYYFTYRDLHLHLFKNAEDSRRVAPAISINLKGCEVTPDVNLSQGKYAIRLEVSPDGGHGINSEVWVRCENEQQYAKWMAACRLAAKGRSLADSSYESEVDSILSLLQMQRPAHGVHVNIDPRSVEAVDYLSPKIIRKLSNKAVQRILEAHANVRELNALDSKLKYIQAWRSLPDFGVSLFIIKFDGHRKEELLGVAHNRIMRMDLSSGDHIKTWRYNTMKAWNVNWNIKCMMIQFEDENVVFSCHSADCKVVHEFIGGYIFMSMRSKDTNQTLNEELFHKLTGGLAPDQGDVLKQKIENLIRDDDARNGKAIQRKREQLFRNIWQQRCYTNGTLLSAIIYVLVTPDTDPESALQSTNYSCHPVFRTRRCLKGENSAACCMIFVDENARVYANWEQFVFRNTLPKGLMIAPSQGIYTFTGDEEPGVQLMVHPTPAARARYKILNAGDKVATVGSLVASVPAAAALAVPLGAPLAIAATAVGVATGVYSTLRSASHLIDRRRHGQSTCITDTEARSSWLGVAGGVVGLGASGATKALSTAAGAGYKVNPAAQLAVRGINGASMVIAGTGVANGVYDLYSKHGDDQAINSLDMLKMASHLVIFTHSINNMRIASKATNGKIFDRISQETVKLHNESGQFDIVRTLNEIPFKEVLLSLHNMNSHLSQGLTVATTLLPQILSYGIGGQMVINMDMLAQKFGGKFVEHIGNLASFTDVLEAMARYFSDQAVQLLMQMTRTFVEENVDYIDRSLNTFVSTEAVLYRILMHCVKTFDDFGEDFLQRQREDILMVVSKYFRSLEPVGEQNCRKYKCNVCKGAYYISSI

SEQ ID NO: 60 - DNA, 1926 bp, Drosophila melanogaster
atggcatctcaacgcttctgcctgcggtggaacaaccaccagagcaaccttctgtccgtcttcgaccagctgttgcacgcagaaaccttcacagatgtgacgctggccgtcgaggggcaacacctgaaggcacacaagatggtgctatccgcctgcagtccctactttaataccctctttgtaagtcatccggaaaagcatccgattgtcatacttaaggatgtgccctactcggacatgaagtcgttgctagactttatgtacaggggcgaggtctcagtggaccaggagcgactcactgcattcctgcgcgtggccgagagcctgcgcatcaagggcctcaccgaggtcaacgacgacaagccctcgccggcagcagcagctgcaggagcgggtgcgacgggctctgagagcacagccactacaccccagctgcagcgcatccaaccgtatttggtgccccagcggaatcgctcgcaggccggcggtctgctggccagtgccgccaatgccggaaatacacccaccctgccggtgcagccatcgctgctcagctcggccctgatgcccaagcgaaagaggggcagaccccggaagctatctggcagctcgaatggcacggggaacgactacgacgactttgatcgcgagaacatgatgaacgactcctccgacctgggcaacggcaaaatgtgcaacgagtcctactccggcaatgacgatggctccgacgacaatcagccgaacgcaggacacacggatgatctaaatgaatgtcgcgattctctgccctcgaaacgatcaaagaactccaaggatcaccgcgtggtgagccatcatgaagacaacagcacttccgacggaaacgacagcgatggcgaaggtctggacacatcatatatggaacctcaacttatgctggacgaatatgacgagcccgtagagttcaagtacaacccgctcaccgacaacagctcacccacgcaggaccacacggatggtagtcacctcaacgagcaggcgcgccaacaagccttcctcatcgctgcccagagaaaacaccaggtggaaacagcagcagcggcggcggccagcggaatcaaacttaacattatcggaatggcggctggtggagcgcaggtgaaaagcatggtcagcatacccaaactaacgcccattggcaaggtcaacgccgcctccacgccattggtctcgcctgccggctccttttccacagccacggtcaagccgcgcgtccagaagcggcccaaactgggcaaacagaacggcgatgtaaaaccggctgtgtttagcagccaggaatacctcgacatttacaacagcaacgatggattcaagttgaaggctgctggtctgagcggaagcacgccgaacctgagtgctggattaggaactccctctgtcaaaaccaagctgaatcttagcagcaacgttggcgagggcgaggcggagggctcagtgagggactactgcaccaaagagggcgagcatacgtaccgatgcaaagtctgctcccgcgtctacacgcacattagtaacttctgccgtcactatgttacctcccacaagcgaaatgtgaaagtgtacccctgtcccttctgcttcaaagagtttacgcgcaaggacaatatgacggcgcacgtgaaaatcatccacaagatcgaaaatccctcgacggcgttggccacagtcgcggcagcgaatctagcaggccagccactgggagtttcgggagcctcgacgcctccgccgccggatctgagtggtcagaactcaaatcagtcgctgccagccaccagcaatgcgctatccacctcctcctcgtcgtcgacgtcctcgtccagcggatccctgggtccgttgacgacctccgcaccgccagcaccagcagctgcggcgcagtaa

SEQ ID NO: 61 - protein, 641 aa, Drosophila melanogaster
MASQRFCLRWNNHQSNLLSVFDQLLHAETFTDVTLAVEGQHLKAHKMVLSACSPYFNTLFVSHPEKHPIVILKDVPYSDMKSLLDFMYRGEVSVDQERLTAFLRVAESLRIKGLTEVNDDKPSPAAAAAGAGATGSESTATTPQLQRIQPYLVPQRNRSQAGGLLASAANAGNTPTLPVQPSLLSSALMPKRKRGRPRKLSGSSNGTGNDYDDFDRENMMNDSSDLGNGKMCNESYSGNDDGSDDNQPNAGHTDDLNECRDSLPSKRSKNSKDHRVVSHHEDNSTSDGNDSDGEGLDTSYMEPQLMLDEYDEPVEFKYNPLTDNSSPTQDHTDGSHLNEQARQQAFLIAAQRKHQVETAAAAAASGIKLNIIGMAAGGAQVKSMVSIPKLTPIGKVNAASTPLVSPAGSFSTATVKPRVQKRPKLGKQNGDVKPAVFSSQEYLDIYNSNDGFKLKAAGLSGSTPNLSAGLGTPSVKTKLNLSSNVGEGEAEGSVRDYCTKEGEHTYRCKVCSRVYTHISNFCRHYVTSHKRNVKVYPCPFCFKEFTRKDNMTAHVKIIHKIENPSTALATVAAANLAGQPLGVSGASTPPPPDLSGQNSNQSLPATSNALSTSSSSSTSSSSGSLGPLTTSAPPAPAAAAQ

SEQ ID NO: 62 - DNA, 144 bp, Drosophila melanogaster
taccaccaaaatctttgacggtcgcgggaaaacccgccgggcatacgggtcccgcgagggcgggacttttaccacgtctttgcgatgtaacctaatgtagtgaccgaccctggttaggcgaggttcctcgatttcctcgtataa

SEQ ID NO: 63 - protein, 48 aa, Drosophila melanogaster
MVVLETASALLGGPYAQGAPALKMVQKRYIGLHHWLGPIRSKELKEHI

SEQ ID NO: 64 - DNA, 1053 bp, Drosophila melanogaster
atggccccacccacggtcctggtcaccggaggagccggctacattggctcccacacggttctggagatgctcaatgcgggctacaacgtcatctgcgtggacaacctgtgcaacgcctacagcagcggggccaaactgccggaggccctcagccgggtgcaggaaatcaccggcaagaaggtcaacttctatagagtggacatcacggacagggagcaggtgcgctccgtcttccaggagcacaaaatcgacatggtggcccactttgccgccctgaaggccgtgggtgagtcctgccgcatacctttgcaatactaccacaacaacatgaccggcaccaatgtcctgctggaggcgatggccgacaacaatgtcttcaagttcgtgtacagctccagtgccaccgtctacggtgagccaaagttcctgcccgtgaccgaggagcatcccacgggcaactgtacatcgccctacggcaagactaaatatttcaccgaggagattctcaaggatctgtgcaagtctgacaagcgttgggcagtggtttcgctgcggtacttcaacccggtgggtgcccacatcagtggtcggattggcgaggatccgaacggcgagcccaacaacctgatgccctacatcgcacaggtggccgtgggtcgacgtcccagcctgagtgtctacggcagcgactttcccacgcacgacggcaccggcgtgcgcgattacatccacatcgtggacctggccgagggacacgtaaaggcgttggacaagctgcgcaacatcgcggagacgggctttttcgcctacaatttgggcaccggcgtgggctactcggtgctggacatggtgaaggcgtttgagaaggcctccggcaagaaggtcaactacactctggtggaccgacggtccggagatgtggccacttgctatgcggacgccacgttggcggataagaagctgggctggaaggccgagcgtggcatcgacaagatgtgcgaggacacgtggcgctggcagagccagaacccaaacgggtatgccaacaagtag

SEQ ID NO: 65 - protein, 350 aa, Drosophila melanogaster
MAPPTVLVTGGAGYIGSHTVLEMLNAGYNVICVDNLCNAYSSGAKLPEALSRVQEITGKKVNFYRVDITDREQVRSVFQEHKIDMVAHFAALKAVGESCRIPLQYYHNNMTGTNVLLEAMADNNVFKFVYSSSATVYGEPKFLPVTEEHPTGNCTSPYGKTKYFTEEILKDLCKSDKRWAVVSLRYFNPVGAHISGRIGEDPNGEPNNLMPYIAQVAVGRRPSLSVYGSDFPTHDGTGVRDYIHIVDLAEGHVKALDKLRNIAETGFFAYNLGTGVGYSVLDMVKAFEKASGKKVNYTLVDRRSGDVATCYADATLADKKLGWKAERGIDKMCEDTWRWQSQNPNGYANK

SEQ ID NO: 66 - DNA, 8227 bp, Drosophila melanogaster
tacacgctttcacacaaacagtttaacaaatcggttttaataaacaaatgtatcaacaagtcgcatcgtgctccgacaaaaggaattaagaattgttgtatctatgtgagcggaaccgattaaatgtggccttggatttcggctaattgttatccttttatcaggatgctgtttatcgggcggaaaactgtatacttgtgtattgatttgatggtgtgtcgagtggtttttgtattttatttaagcctttcatatcgtggtttcgactttaaagttcctctacgacgagtttaaagtatgaactacagtttgttgctgctggggtatcgttgttgttgttgttgtcgtctttctcttccttttccttgttgaccttattgacattcgatcgcttgtctccctctctccgttagagacatgtgtgtggacagcaggtcgccccctttctcgttttctctcgctgcctagagggcacacacaacaagcgtacgcgctgtacgcgcctgcgattcactcacactcactcacgcgcttacgcacactcacacccgccactcctattaagcgagttaagcgtgcgtagggtgtctaggacgtctaggaggtcaaacaagcagtttgtctcagtcgtaaagcctagtttggtcaacggacagtcgttgtaattgtcggagttgcaacctttttttttttgttttcgtcgtcgccgtcagctatttttttagtaatagttttaatgccttttcgctagttttaagttcgctctaatcgatccgctttacgtcgctgctcttgccgttcgttccactcaatactaacacattaacatatagctaatagggggtttaagtatttctccattaccaagattctgagaaagtttttaatttttaattaggatggtaaattcaaccgtaacgaaaaccgatgtcataactttgggtaaatatcaaaagataacagttagcttttagttctattcgcttagatcgggtgaccgaaatagggacgaaaacttagacttagaaaacatgcggggaatcgatatggaaggttgaggttcgccatgagtttaaaactgatctctggtatccgaacgctgataaatattaaaacgtaactattcggcacgattttttggtaacggtgatagatgccttcgctgcagacaagagtatttacaaggtataagccatgatgtcatgtgacaatagtccgcatcttcgccaacctataaaactatcgctattctaataccgacacagccctttgcgcacaaacgttcaaaattttggattgtcaaaactaaaccaaccgaatcaattggttatcttgatcgaaaagaaagtgagtattttgaaaaattttataattgcttacgtttgacgcttaaaaatttcttttactcagaccaaattttattaaaataaagcaaattgtatttatttaaaggtatttcgattaaggaaaattaaaggatcgcttatgacatgtaacagttttcaagttcgttgtctaaatcaacatcgacggaaaaaacggcttgctaaaataaaaatcgtttctctacaaagataaatttgaacacacaaactaaaataaaataaaagcgttcacaaaaacaacgaaaaccgaataccgcagacgaaaaagagcggagaccgtgcggtcggtttgattcttcttctcggtactcttcccccacttactttacccaaaggttacgttatgtattatgggtgtatgtatgtatacacccacgcactatctatcgtggccagaaagcacatcctctcgccctttgcttcacgtgtgttgagtgcgtgtaatatttataaaatatccgtaaagtcagctagccggaggaacacagtccggctgccttctcggcggaaaaatcggaacttacacccaggtttcgaaagcaacgactgctaaaatggagcacaagcgaataactgtaaagatccaagaacaacccggcttcagaaggacacagacacatagagacaaaaacaaaaaatatcaagaaatatgtatgcatgcgcgtatacaaacggtaacccagaagggttacaaacgacagacgtaaaagcccagaaggtcgatatatatgagtgtgtttcgtgaacaaacgaacagcgagtagttctacccattctttggcccctgaagtcatcgtgggaaatagcccctaagatcaactggagaccctcaatatattcttttcgtcttgacccttcagtcttctgcatctaagaccaggacgcttggaacttacaacaagacactttaattttgacaaagtactgggcaaaattatctaaatccaatccagtgttgaccaccactaactcggaaaagagaaattgcaaatgagttgttttacatactttttcgttttttttttttttagtacaatgttgtaaataaaaggtgaggtggccgccatgtattatgttcttttgcctttcgttgattgggtcgatttgattgcattaaaacaacgatcggttgttttgtttgaatgagtgtgggtagatctataagtgtaaaggtgtgtaaaatcaacctctgtcgcttacattattttttgtttgaaaaacataatgaaaaataataaattatcggctcgataatactgttcacttaccacgtccccgctgcccctattggatttaagagtcaatttttgctcttgttttggttgtattgcatccggtgcggtcagaacggtggtcagtaagcatgtcgtgcttgatcgcaacaaccaaatcatagttgtatataaatttgtactaaaatttaatacaattcctgcggacggtattaatacgattttatccattttatatcaaaatttaattagtcggaatatcagctttaatgcttcgtttcttagagatcaataataaaaaaattttagatgaactctttgcatggagaatttattaaaatgctaaataaattctcaaattagatcccatcgaaatgacatacttactccgtttttcttgtcgtttttctttcggctcaacgcacatcgcttttcatcgaggttattattatgttctttttgcgactacttttcgcttgctttcgttctcctattaccgcccgctacctgacccactggtcactcgccgtcgacaccacggggtattttcgttcctgtttaacgcctaaatcgtcttaataacacttacatttccgcttgtgccgcttcattttttcgtttcgtgttcactgggtagtttgtaaacgtgtgtctgtagtgcgtgataaatggccactgcagtaatccgacaacagctgacagttagcgaagcaaaaaaaaaatatataaaacgaggtgttcactcactcaccaactctgacgcacccccacaaagtaagagagagtgagagatatagagagagagagaaagagagagagacactcgatatcttttcgggcgtgtataaacgagtattactttctttttgcccaccatgtttaatttatcagacatcggaaatgtttaattaaaaaaaaatctttaactatttttggccaaattaaagtctgcaaaaaacagggtaaaggaaatttgtaaaatattctcatagctttattggttttactggtaaaagaaaacgagacgagttcctttacgaaaagaaagtgaaccgaccaaatggacacagaatctatttacgtttttgttccctttttttgatgattacttacgtacttctcgttgcagtcgtttttcgcccttttgtctttttggttataacgcttttaaagaagattaatttaatctaagagctaagggcatttcctttgctccctttactttccaccccttacgtgcacccgctttcattttcggacagtttgtttagctatcctaaagtgtatgtttgtcgactgtgtttcgaaattgccacggagaaaaaggcaaaaataaaaagggtctgaacgccaacctagcaaaattcggataacagttacttagtagttcattaacagtctaccatataatgtccataaaaaatttcatactattttctccatttctaatttcaccatgttttcgtgtgtgggaaatttttgagttatatttggctcattttgtgttttttagtagctaaacgtcggatttgaaatgttatgcccattgtttagaaaattttattttattttttaagaacagtttaaagagcgaggtcgagaactttaaagttctcgtcgtggtacttcttttacttttccctgttcacgacaagttgattgagtcgaccgaattcaagcgaaaagagaaggaggcacggtggggaacttagaggtggggagatggaaagatgaacgcaattaaaaagtagagagagatatagcgccacagacctcagcaccttaaggatctcaccttccttttcgcctgtttgtctaatctacaccgaaacctctcctctcctcggatcgttctacgagtccagttcagacccaaaacaaactcaaggaaaacaaaggtagtgagagtaacgcaagacaagacactaagaaacggctcataaacagttcacagacccccatattccttacctttgaaaaacatgagtatcaggagcataatacttttccgtatatattatatgttcataaggctcattccaaatatatacatacatattttcccccataaattaaaaaattataaatagttaattgttgctcacattgcgcacatcgttttgtatattaggcttttactacaaggcgtcagctttagggcatgtgcactaaaagacacgacatccacaaatggtgtcatgctacacacagcttctttctaaaatcagtaaaaattacttgagtttctccaccgaaacttgagaaaaggggatagagaaacaggaagaggaagcggagttctaacagtcagtacatacattaagaagatgaaatgtgagaacagatgactattaattcgtggttgaccaaaaaggtatatggtaactaaaacaagaacataagcggagaacccaaaggtgagtattaacaaaaattaaaagcttttgtttatttacagcaaccttgtcgtttgtatttaatgtaaaattaattaattaacggccggtggttttctttaggtttcgttgtcattctgagtgtctttgcttgacatttaagttgtctttaggggtcgatagcggcggagacagcgccgagacgttaaccccagtttacgcatcagcgtatagttgacgtcgttggagacttgcgctgttttttagcctctctcccttgagttaattggttttcagctacaacaacgagctcaaaacaaaaacgtcaaagaagtaaaactattaatgtggtggtcgacccatatagctgtacgtcaaatttcttttaataaactaacttccaattcagtgaactctggaattgatttataaattagtaaattaatactgggcgccgccttagctatagatcatatcgttctatcaccacatgcaaatgatcacatgcgaaatttttatttatacattaactaaataggtctaaaaatgtcgaaaaggtaatttaaactgtcgacattacaactttacattacgattaataattctttattgatcaaggaattattctatttttctacctatttacacaggttggaatagctcaggcgacacggataaagacccctgaagacaattgtctgagacaatgccgtcggtccgtatgtcgaatagcgccaagtccgtaccgtgacgacatactcagtgagggagtgagtgtggggagaagcgagtaagcgagagcaaccatctttgaagtgtcaacgctgacgcgaagtttctttagggtaactcggtttcggcctctggtatcagagagaatggccgaaccaagtgaataaggcgaaaagcaagaggcacgaggtaagaggttgagttaagccacagagactcacaaactgtccacgcaaaacaaacacattgctcaaacgagcgctatcaaagagccggagactgcgtactgggcgatagacagagacaacgtgcagtaatagtcgaacagcgagcgagagcgtcgatctacaagaacaacgaaaagagagacatgtccctgttcttgtccttgttgttgtagttggtcgtcgccgtacttgttattagtgtatgtttaagtttgacgagttaacggcgtaaaagtgtgcgagtgttcacaaaatcaggcgagagagttagagtattcgaaacatagagagaaaaagaatgtgtctctttttaagtcggataattgcatcagttccatgattagtatttggtcatatgaaagtttaattttacatgtaaaagtaaagtatcttggctaatgttttattttctttcgtaaatcaaacaatgactcttacaataggatttaactagaagtactagatgattttaaaaagatgcacacccaaattaaaacgcgagagaggaagagaaggcgaccgaagccgtagcacacaagaaacgcggcctcgagtgaactaaaagctagcgaaccgcgccgtcaacagtaaggcagaggaggaggcggcatagtaacaaaaacgttagcgtcgagagagcgtttagacgcgacgcccacacgtcatgtatatgaacactcttgaacaccacacaatatgcgcaattagcgaaatagcgacactgcaacttatttaacacaaacgaggtcaaaggaaaactttatttaaagttacgtcacgtcggtgcaaaaaataagcgaaacgacacacacacacaattttcaacctgttttttttaccggaccttgtattgtcttttctcaacaccgacagtttgacaacgatttgtggagaatagagttagaaaaaactgaactgtcagacgggtgttgaccttttaatagataggagagaagagcgagacaacacatacacacacaaacacatagaagatgaaaaaactcagtcgacagacacgaaatgaaaaagtagaggacgtgtcgaaattgctcaaaccaaaagggggaaggacaattacaaaaaaaaagcaattcatgataagaatcgagcgagcgtgaaaagaagcaaaacgacgtgtgaaacaaatgacaacgacaaagaaaacgacgaaacctcgacggacaaacatgtggccgttgtatttgaccaaaaagctcaataaatactgaaaaaaggtgttaaataaaacggacggaaaaaccatagacatagacgacgccggaagagggagaaagagagagtgagagagggagagcgtgagaaaacaaaagtctgaaaactggacgttttcttttcattgatttgttttttcacaaattttagtcaaacaacccccgcgaacccagaagccgaaaccgtaattaaagcattacaccgctttcgactcgcctaaagagtatgtaacgacgtataaaaggctagaaagggaaggcaagtatgaagagagggaacgagctagcgtgtgtgtacgtatatctttctgtttcgcgtcgcctataccgtttaatttttgtaaaaggtcaaccctaaattattatcatgcttttctcgtttgtgtttatatcaacattaattttaatactatggctttacacatctcacatttctcttctttcgtctttttactaactttttataccaacgtttcggtttatttttatttcaaataaacaattaaaagttcggttggtctacacgttattttcacgattttaacactttttaggttcggttcgacggttgatttgttaatattgcttccgttatttttaattttgtgcaagagtttgcgttgtcgtaatttagttgtcgtcgccgttgtttatgttgtttgtgttgttgcttctcacttgccggagtttcagttgttgtcgacgaatgtcaaactgtcggtaacccgcagccgctagggggcgctgcgagacgaagaagcagaaagtgccctaaggtacgtactccgggaagagcggtagagcaagggtgactttcatggcaaggtgcctcaggtggcccaatcaaaagtatataaaataaaaaaaaataatgaaaaagcaaacaacgactgagacggtttgtagcaggtgaacacaatttgtgtacaattcccgagtcaaagcttactgtacgttgtcttccccaacaccctttgataaaatctatgtgacgtcgtcacactggtgttagaacaaataacg

SEQ ID NO: 67 - protein, 1148 aa, Drosophila melanogaster
MPGKLVGSPKGAARTGTQAIAHAGDHSDLDEPKPKIAKSDPPSTAIPKKNNFKQREGTKNVKPPTLEEMKELRDTQNLFHSNLFKLQVKEMLEELQLKQKYTDFIENWLESFTAFTRQLKDGLMERTHLEVPMKLSEKPTGFVFSKPTREPYLIGAAATGTLLGPKIVVDVALEMPKESLHKEDYLNLRYDQKRALYLTYVTERMMESPDYAEDQFNFNYYANNPLKPVLELIPVTKQVNKHLQVRLFITAPLSSFKPGRFVPWNNNIRPSFYGDEWDEKDPLPSTQHYNANVLFDLTLSENQAQLDKAFKSRRNFQDGLLLLKVWLRQRQLDIGYSGFGAHILAAFIVYLNTQRILHQSSSSYQVARTVWNQLANTDWTKGISLSVAPIQTEELNKFAEHYDVCFIDFTGQHNLCANIPLYLYQRVREEAKLAVELLNDMKLNSFPLIFMQKCPLYSRVDNILKLLKKGLAERVHSILPLETATAAWPVEKKAPVIGKYIQLGLILQPEHAYQVLNKGPAANDDHEGAEEFRRFWGEKSNLRRFQDGSITEAVVWGTAQDSPAKKRLIVRQIVLHLLEHHLQLDSKEVQYIGGELDQVYQLSPWFKVNKLKTKLPLGQDTDAEALSPHVIRCYDELARQLHGLNDLPLEIVSISGVSPIFRYCEPQPVLPQALLVENRILASSIQRVVIQLGQSGKWPTELGALRALKTAFLIEIGEKLEAQCRLHWVMSADGLLVLKQGYCFLIELAHNKELALLKQEVTERGITTYIDNAASRSLERQHYILPKVSGALHSLHQTYSAFGSTVLLAKRWLATQLLDDGLWPDMATELLVAHLFQQRYAPQSIAAPQTGFIRFLQLLSHSDFNGELFLLNFNNSWQEQQIADLEHNYRSNRQSYPPLAVATSYDMQHAGRLWTSDQSPSQRVLGHVTRLARHALEIIETSLMSKDLRFVRPAQLFRASNEGYDLVIQFKPDLVPNSLSYDLGSPFVSFSQPNFSLPRAGSDYIARIVGLLRSAYSDFAAFFYNPHGGKELGIVWRPPTEFAAKPFKVTELQACSPCGNKKVQVLKETLLEDFKLLLKDFYLRIATPEELKREQREHQKPMRYFDANKAEEESKPKPKKHRQRKGTGKKALPKRKRLIKSSTLKVLK

SEQ ID NO: 68 - DNA, 1126 bp, Drosophila melanogaster
aattcgctttcgatttcgctaaaacacaacgtaaaaaggccttagctccactgaaaaatcagattaaagctgtcagcagaaggtactggaaagcattcgagaagtcgaaaataatcccaatcaagcccatcaaattgaagcaggcgacgccttctgcgccagtgtgtgtaaaggcagctagattttcaatttcaacgcctatttaacattgtagctcaactcgagtcgcctcattctcatttctgcatttcaagcaaatcaaactaaagtgaaaaacaaatttttgttctgtgattttgtgtaaagactacgttcgacgatcaaagatggtgaaactaattgctagcctgctcctgttggccgtggtggcccaggcctatggagatttcaagtgctccctggctgttcctgagattaccaaggactgggtggacatgaaggatgcctgcataaagggcatgcgcaatcagatccaggaggagatcaacgcctcctaccagtacttggccatgggcgcctacttctcccgcgacaccgtcaaccgccctggattcgccgagcacttcttcaaggccgccaaggaggaacgtgagcacggatccaagctggtggagtacctgtccatgcgcggtcaactgaccgagggagtcagcgatctgatcaatgtgccgactgtggccaagcaggagtggaccgatggtgccgccgccctgtccgacgccctcgacctggagatcaaggtgaccaagtccatccgcaagctgatccagacctgcgagaacaagccctacaaccactaccacctggtggactacctgaccggtgtctatctggaggagcagctccacggacagcgcgagctcgccggcaagctgaccactctcaagaagatgatggacaccaacggcgaactgggcgagttcctgttcgacaagaccctgtaaggaggtggagatagagaaggcgcagcgcccagtcacgcatcaaaattatcagccagtcgagttatctgttatctgtcagcccagagagccttcccgagggtccgctattaaatcatcaccagccaagtcggcgactggccaataaattatccgttcgactgcgatcctcaaaccagcacagc

SEQ ID NO: 69 - protein, 205 aa, Drosophila melanogaster
MVKLIASLLLLAVVAQAYGDFKCSLAVPEITKDWVDMKDACIKGMRNQIQEEINASYQYLAMGAYFSRDTVNRPGFAEHFFKAAKEEREHGSKLVEYLSMRGQLTEGVSDLINVPTVAKQEWTDGAAALSDALDLEIKVTKSIRKLIQTCENKPYNHYHLVDYLTGVYLEEQLHGQRELAGKLTTLKKMMDTNGELGEFLFDKTL

SEQ ID NO: 70 - DNA, 11527 bp, Drosophila melanogaster
catgccgtggaaaaacagctgagcggtggcgagagctggtcccgccaaatttacccgagctacggcagcagtgccgatgcctcctcgcagggcagtcgcctctacagcgtggactcctccagcagctccagctccaattccaataattccggaggtggaggcagtggaactgcaggggttgagaatttgggaggagtcaccggcagcgcctacgcccagtggcagagcgaccgacactctctgccacaggctgtgcccgatgcccctcggtcgctggctaaccaccactaccgcaactcgcccacccaccaagcccactaccagcagcccactagcggcagtctcaagcggacaccctcctcgaagcgcagcttcctggaacgatctcacagtccggctatatatggtgtgagtagaatggtcaagccaaggatgcaaaccgatcaggaaagcgaagagagtgcttgctagaatcaggaactctctaaatgaaacagctaccaataaaaaaaaaacaaaagtaaatgtcgtaattaatgaagaacggttttatatatactgaaaatacgaaaaagtttattaaactttttgaattcagcatgtttctagcttataatcggtttgcacctcttaatcggatatctttaagacatgtagttaatcctatccaaacaaaacttttagagcatgcgtcgcagtgcaggtccggacttcggctctcccccgcccaccgcacccgtcggtggaggcggctacttcccacacgatctcgacgacatctacgagagccagacggaccatcagtatttcacccacacgggtgctagcggaccacagcagcagcgacccacggctatctcgatctttcatcgagtgagtgctgcccacacctcgctggacgactataccttgcccggggatgcatcgcgccagtccatgaatagtacagacagcggggtgagcagcggtcccttcaatcgccagcgtttcgacaactcgtcattcgccaagagtctcagcatcgacgaacaggacccacagcactcgccccataaggaaggtcacagcaagcacggaaagcaccatcaccatcatagccatcaccaccattcgatccacgagctagtgaagcattttggcaaaaagatgcacctgtggccgaggaagcaccacgacgcccagagcgtttgcacctcgccacagaacgatccgcaggagaacttccgcaccagatccaagagcttggatgtgaacacgctcagtcgccccaaccgcattctcgatgactgcggggccacctacaagatatacgatcgcatagtcaaagaaggtaaagggtttcgggcgggttgctttccatttggtacttgctgttcgattaggtctagtcttgctcctttaattctgtattcaagcacctgtacttatggcaatttgttgtattcttttaggtgctcacatgcgtcgtgcctccgcggatttggagaaacgtcgtgcatcagttggtgccgcaggtcgaggactgcgaggggatggtactttggatccacaccatgcagccatcctcttcagagactcacgaggggtaagtttaaaacttgcagctagcgtataaattagcagaggaagtatctcataaattgtctctttgtagtttaattagcttaaaaaaaattaagaaagaaagaaataaagaaattcagttgaaaaattcagtactaagcttaatgaaattaagaaaaaagaaagaaaagaaagaaataaaaaaattcagttgaaaagttgaatttctttatcttgtttagtttgataaatattttgaaaatttaattagggctgtgacatacttatcgtcctcgttatgcataacaaacgacaaactgcgtagataataccccataactttttatacaattatcttttcaactagatgtaataatttatgatcttgcatataccatctcgccagtattttcccttccactttctgttttgccttttcttatcgccttaaaaagcaatctgctcgcttctctgattcagagctattaatagcttaaaaatacacttctatgtatccccttttctcagaggcttacactgtttgactcctcccccttcttgtttacttcgttcggttcgcttcaccttgacatttctgatatactctgttacccgttgagaaatgcgtttttccagttgcttgcataataccttcaaggccgtgttctgtctacgtaattctccctcttcttctatttgcacctgttgaatgttgagagtatcaagcaatttgtcagttttcaagaactccataataacccttagcctattttgttttatattgcatacttagaggttttcgcactttacactcaatgtagactacatgtagagtaccacgcggcttattaaaagtacttattacgtatacgacgtgagcaactagggatagtcacttacatatgaaattttagcgagattggtgaaactatttcaaataggtgagtcactttatattaaaatcaagaagtcatgctgatagctagttgacttctctgatggttttgtcatcaactttgaattagtcggagaattacctttctctggggtttcgctcacacctacatatgtatatgtaaaacccaaggcctcataatgggcctaatgaccattataaacagttattatattgttaccgtctgttattgtttacttcgccgtccacaacgtggtcacccatgaaaactggtttatatcgatagatttgaatcatgtgtcaagtgtttgttgttatactatgcacattcatgggaattctttgcgaacttttctgtattctgacgtcagcggattgggctttcaccattaaattctttttggtatttgtttgttgttggtatgtgcccgctaatgatgatgattaattagccaactactcttcacatgtcaggcttttctcactgttcttcgcttcctctctgtctctctctatttctaatttctctttagcaaggccacaatcttgcattaccgtttgcctaacttatcgctcaaagaaaacaacaaatgtacacagaagctctttactttgtcgatgcgtatttaaactgtgtctcttcactcttgaattgagtggattcgcctttgagtcgagtacccttgccgcttcttcttcttcttccgcctgcagtggccttcttggtcatttcgattgtgggtgcaagtgggtctctctcgttgtcttctctcttgtttactcaagcgatataacgattaagtcgaaaaagaaataaacgagacccattcttctgataccctttctgcatacgggattcataatttccactcggttgcgatctctctctttgtctctctcttgggtaagaagaaaacagcctacagcagggagacagctgaaagataagcaaagcaaatgaggtgaaccgttggacaaaccaaaagtttattttcgatgcagtcaacccagatttttactgcactcgaaataattattgaatcgtacttctcagatttttgcaatataagctaaaacatttttataagaccagcaacactcaggatgacgacatctaatcaatcaattgtggcaacaattgaatacagaaagtattatttgttttattcactgttgttaaacgtgtaatatcatcagaatgtgtgatttattgcgattattttgtgaagtgtaagtgcattctagggtcttgtagcttcgttacaagtatatttacattgtgtggcgtgtgtgttcttgtatttgcctatactctagcactctcgcgcacttttggcgctctcctaggccaatccgctcgctctttttctcctctgctctttgtcgtggtgcgatcatgtgtggggtccggctggcgctcgctaaactcttaaccagtggctttttaaccagtttaagtttacatttgcgtgagcgcagacgtgtccggaaagcgaacggaagacaagtggaacggaacacggccgtataatcagaaatcaaacagagtagtggtgtcgtcacttttgcgactctccataaaaatccgtctgccagtgcttgttgcttcttcttgagtgcgcggttttcatgtatcgccgccggtattccgccttcgagcccagcacaccccgcgtgggagtgctaccctctccaccgcctcaatatgccaaccctcccgccgacactgccgccccgaaaacgccacccaagctgagcgtacactttgaccccaatttgccgaaagacaacgatagcaacaacaacctcaccggcagcgaaaatgcaaatgctaaaggcggcggtcgcaaggcgcgttcactaagcaattcgccactgtatcaccgaaaaaagcggtacggccatctgccggcgctgatgtcgaataacgggccgacggccagcagcaactaccagctgctgaacagtgcgaatctgcgagatctcatcgacggccaacgccactcgcatcacgtaagcaggcgcgatgacagccaaagccacagtcatagcgaaagcccaagtcacattggccacattagccaaagcaaccaaagcataccaagcctcccaagcctgccaagcggcaaaaacaagacgaaagatggcaaaaagctgaaggcaactttaacggcggccatgtcatcgtcgctgctgcgacgcaaggcgcacagcaatcacagtcaacagcagaaactgcaactgcaacagcaacagcaagagcaacatcagcaacagctgcagcagcaacaattgagaagcaacaacagcaaggcaattgcaaatgctgcccgccattcgctgggtcattcaccctccgctgccgccgccgctgctgcagtgcagcagacgcttgtctacgagcggcgacgcgtcagcagcgcccactcctccccctcgcccacctccaggcaccactccccagtgcaccagtgcatgctgatgcggcggcgcagcgactacagcgtcgagcagatcgagcagtggaaacgccagcagcaattgttgccgcgatccggacgcaagattagcgtaagtgcaccgggagaaacaggctggagttgtataatatatgtcaaattcttacatctttttaaacagttatcttcgcttgacaaagtgtttttaatataatataacaatattgaagaccaatggtttttgtatcggtgctcttacggacagatatttagctgttgaagccgtagtacgtacgtgtatcgaaatacttcaatcgatacgcttttctttttgtgtgaaaatgcattgagatgaaaacaaaggaaaagccaccgagtgtgtgccagttgcaaagctttaaggcgaagctttttcgtcaattgaattcggctgcattgagtgcaatatatatttagacaaaatgagggtcagccatacaatgcacatagaaaaaacaaatagtcaatacacaatttgcataaattgaaataagattgaactgtatgttttgctcattgacataaatgaatttggttcttgaactcttctcttttaagttaattaaaaatctggagaaacttttaaactgaattataaatagaaatttgttgaatattcttttacctcgaaagataacaaggtacatatgtatttctcagtgcacacttttcttgaccccatttctacatgctaagagcactgcgagagaggaagagaatgtgagttgcgggcaaagcgtttaggctaaaccaaaattggcccgcaactgtgtgcgagtgtaattgttcaattgccgtatctgatatggggtacttgtcccattgcctcgtttccacgaccgccctctctcccctcgctaatgtgtcataattccacaattgcacatttcaatgttaattcaaagctactcaaccgagtgagcatacagctcctcatcccccccttcttcaaccactcggctcacaaatatttcattggggctgaaattattgttcctctgggttttatctgcgatttcgcgttctgattgccagataacgtgtaagagaactatatcagcgcagtttatatttctatttacgtttgtgtttccttattgtttacttatggtattgtgttgtcgacacttctatccctgaaatgtgccaatcattgtgacccacatgtaatatcggaatggtgaataaaatagggctaatattccaaactatatcagagtgtaaagaaagaggaagtgctaagacatcgtaacttaaggtgtaagttatactacgccacaaataacttgcataacgattaacgaacgtataagtatatgtttgtacatatgtacattttacgacttttcgagttagctcgtttatttctttaatgatagtttacatttcatcatgtagttaacagttataaattaagttttagcatttcgaaagtagataaacgaggtaaataaatttagaaaacttgattttagagattaacatgtttccgttggactttcaaaacaaaagatttatatgtaatacgaggaaactaatactttccttggtgatatttaaaaatctttgagaagaattttattttccttttttatgcatgttactttactaaattctaaccaatccttttttatattacagttgcctgtcgctgatccgttcctagagaaagtaaatctatcagatctgggtaagttttgaaaccaccctcttaatccagtccagtgtccccttttccgcaacggccgtcccgagagacaaacaacaatgtctagtttaaatgaattagcaaacatacttggctggcgttcggtcaaaagtcggcctctgaggattttcgttgggcacacgacgccatcgccagaatatgatagaacctgatataccaatatatctatgtacatacataaataggccaaagaagaagataacttgtggaatcagtcataattcacggggattatggtagcaagtgatttgaatgttagcgtgggctgtctaaaatttacatatagttctttattcccgacaaaacaagtggatagacttctgttcttaaagttcctaaagagaaacgaacacacccccaaaagttcatatttgcttttcttttttaccaaagctaattataagttccaagtacgccggagaccaaatacgcaaatgaagtgagggtactacaatgagagccgaaaggagggaaaacgaaaaaacagtgcatgtaatttgttggcaatttcagacatttcatgatcctcattaaacgtcaattcccagccgatccgattcaaccgatctctcagcaaagattatattcaatttattaaacgctctgagaactcttcgatttagtggcgaggctttctgctcagagcgtttccactattatttcagtctatcatttgtttgtttttctgcgcttttcccctgacgaaaaacttttccgccacagagagccacagcgagcggaggaggagatggaaaacacagagtgtagatcagtttatgataaaatttcgaatcgtttagaacgtcgccaacgaaagacgggcagacgacacaaaatcggcggttttccgttccgtgtgctttccgtgtggaattattggcagcaggaaccattcgagatctatacgtgtctatacatatgtgccaagtgtgtgtctatggacactgcccagagccgtaattacttgcttaccaactcagcaatcgaatccaaccgaccaactgcaagcaaatcaaagtcgacccatcgaaggtcttcgctgttctcttagtcattcgctaagaattttcgaatagcgccgcgacgccaaaagcaactgaaccatcaccaccaccctcgccgactggccacttttcccccacaatcgccgcccattgcgaaaatgggttttcatttgtttagatgccacacggcaaaaaaaaaagaaatagcagagtaatcaacaaagccaacaacgccaaggagcatttcaattaactcttgtggcccgtggcccctgtcaaaagaaacacaaaacgcagaagcgaacagaatcgaaaacgataaaccatatttacctttgctttggcaattggatgcatatgcatatgcattgaaaatcaatcattgaacagcaacagagtacaaaaaagattaaagagaccttcaccgatctcaacaagcgttattgccttcatttccttcgactttctttatctgtgcgaacggttcgccgcccggcaaccgcagtaaattccatttattaaacaacatttaaatgtttacaaagcttagtcgggaatatctttttgccgcttgcatgcatatagctccaaatattttacaatttatttcgatgtgtatattttctggccgcggtatctggccttcgtgttttttctatatattatatttggtcgtttttaaactttctgtttgtctgttgtttgcttatattgtggtggatatcatccggataatttgttggaaatacttttaccagtggttttaaaaatttccactaatctcatactgggaggcggcaggttttccttaaattatttccgctcattaatgcattccatttctatgtcgatgaatcataaatttactttgatctgacttcgtgccaaataaaacatcagattgtctgatcaaaaaataacctgccaattagtaaattgaacgaaaataattttttgcactttaaataaagttatttattatttctgaaatagatttccctatggttttcgcaaaagaggcgcactaatccctacagacattcgaaatttcagtgttgagtcctatgctgcggttaattaatttcttggcacaactgcctgtcccaatatctgttatgtgtcgctataatggctgaattggtttgggtgtatgtttggcttgcatttatcaggcccctgacaagaccgatctgcagcccctgtgattttatatagtttttgattaacaccttttggccccgcctcaatatttatttgtttacattgtgccacagcacagtaggcagtctacattatgcccctctcacttggtggtttctctttctctaaatgggaattgaaataataatatttattgttgaacaatttggcgaatctattctatttcgatgtgttttcctaagctgtggctgcttcggttgcttttgtcgtacgctaaatttattttaattaaaaatgtcttaatttaattcaacgaaacgcgtgcgccctcaaatttatgggcaccggttgttctatttttgggttcgaatacgctgagcgcgaataaatatcgcctaacatccgtagctcactacagtgagaagcgcgtagagcggcgcagctctgttagcgggctgttagctagttggacaatcaataaggcaaatcaattagcgaagcaaatcgagtcgcgcagttaattgctagcgcccacagttcacaggcagaagaccagatcaaattggatcgcatcaatctagcgtaatgcgacactgaaaatcgctaaaaacaaaaacccaaaaataaaagagcgaagcgtcaaagtgaagcacagtggaaacccagaacgcatgttacagttgcacttctactcgaatcatgcgggtcgtttggtactcggaggtggcaaccgtcgcccgaccgacgtcctttgctatccgttggagagcatcaaagagttcgagcagatctctgaggcctggaaacgcctgctagccgagttgctcaagaaaggtggacatcccagatccctaaaccttcagcccatatcgtaaataaatccattatttaaccgacttctcttcttatttctgcagaagaggacgactcacagatcttcgtgaagttctttcgttttcacaagtgctatgatctgatacccacctccgccaagttggttgtcttcgacacccagcttcttgtaaagaaggccttctacgccctcgtctacaacggtgtgcgagcggcaccgctctgggattcggagaagcaacagttcgtgggcatgctaaccatcacggactttatcaagatcctgcaaatgtattacaaatcgccaaatgcgtccatggagcagctggaagagcacaaactggacacgtggcggagtaagtgaaaacccacatttgcattgaatgatgatactaactaaatggtatcctctgctaggcgtgctgcacaaccaggtgatgccgttggtcagcatcggaccggatgcgtccctctacgatgccatcaaaattctcatccacagccgcatacatcgcctgcccgtcatcgatccggcgaccggcaatgtcctctacatcctgacacataaacgcatacttaggttccttttcctatacgtgagtttctggaatattaactacttacctaaaagcaaaatatttatgtgatacttcctatgcgcagattaatgaattaccaaagcccgcgtacatgcaaaaaagtttgcgcgaactgaagattggcacctataacaacatcgagaccgccgacgagacgacgagcatcatcacggcgctcaagaaatttgtggagcgacgagtctcagccctgccactagtggattccgatggtcgcctcgttgacatttacgcaaagtttgatgtgattgtaagtatacctcttagtgatcacagatagatagatagatagatgtgaagtataaatctttccaacaaatgttgtattgttaaaagaaatatgatttagattatacgtatataagttagaaagatcttaaagtaatgtaaatattcttttcgttcagaatctcgccgccgagaaaacctacaacgatctcgatgtttcgctgcgcaaagccaacgagcaccggaacgagtggttcgagggcgtgcagaagtgcaatctggacgaatcgctctacacgatcatggaacgaatcgtccgcgccgaagtacatcgactggtggtggtcgacgagaatcgcaaagtgatcggcattatctcgctgtccgatatactgctctacctcgtcctgcgaccaagcggtgaaggcgtcggtggctcggagagctcattgcgtgcgtccgatcccgttctgctgcgcaaagtggctgaggttgaaataccagcgacagccgcagcggcgacgacaacaaccccgcctcgcagtccatcggccggatccggcaatcgcagcctgatcgaggacatacccgaagaggagacggcgccggcgaggagcgacgatgccgacagtgataacaataagtccgccagtgaggataaagccaacaataaccagcacgaccagacgacgacggctgcgacagctaatggtgatagcaacaacagccccgtagaagtgtcctttgccgatgaggcgcaggaagaagaagctgccgaccaggtcgagcgcagcaattgtgatgatgatgaccagccagcgttagcggagattgagcgcaagaatgcatcgatggacgacgacgaggacgatgggatgagcagcgccgtgtccgctgcctccgctttgggccagtcactgacgcccgcggcgcaagaaatggcgttggttagtgaataa

SEQ ID NO: 71 - protein, 1207 aa, Drosophila melanogaster
HAVEKQLSGGESWSRQIYPSYGSSADASSQGSRLYSVDSSSSSSSNSNNSGGGGSGTAGVENLGGVTGSAYAQWQSDRHSLPQAVPDAPRSLANHHYRNSPTHQAHYQQPTSGSLKRTPSSKRSFLERSHSPAIYGPDFGSPPPTAPVGGGGYFPHDLDDIYESQTDHQYFTHTGASGPQQQRPTAISIFHRVSAAHTSLDDYTLPGDASRQSMNSTDSGVSSGPFNRQRFDNSSFAKSLSIDEQDPQHSPHKEGHSKHGKHHHHHSHHHHSIHELVKHFGKKMHLWPRKHHDAQSVCTSPQNDPQENFRTRSKSLDVNTLSRPNRILDDCGATYKIYDRIVKEGAHMRRASADLEKRRASVGAAETHEGTPRVGVLPSPPPQYANPPADTAAPKTPPKLSVHFDPNLPKDNDSNNNLTGSENANAKGGGRKARSLSNSPLYHRKKRYGHLPALMSNNGPTASSNYQLLNSANLRDLIDGQRHSHHVSRRDDSQSHSHSESPSHIGHISQSNQSIPSLPSLPSGKNKTKDGKKLKATLTAAMSSSLLRRKAHSNHSQQQKLQLQQQQQEQHQQQLQQQQLRSNNSKAIANAARHSLGHSPSAAAAAAAVQQTLVYERRRVSSAHSSPSPTSRHHSPVHQCMLMRRRSDYSVEQIEQWKRQQQLLPRSGRKISLHFYSNHAGRLVLGGGNRRPTDVLCYPLESIKEFEQISEAWKRLLAELLKKEEDDSQIFVKFFRFHKCYDLIPTSAKLVVFDTQLLVKKAFYALVYNGVRAAPLWDSEKQQFVGMLTITDFIKILQMYYKSPNASMEQLEEHKLDTWRSVLHNQVMPLVSIGPDASLYDAIKILIHSRIHRLPVIDPATGNVLYILTHKRILRFLFLYINELPKPAYMQKSLRELKIGTYNNIETADETTSIITALKKFVERRVSALPLVDSDGRLVDIYAKFDVINLAAEKTYNDLDVSLRKANEHRNEWFEGVQKCNLDESLYTIMERIVRAEVHRLVVVDENRKVIGIISLSDILLYLVLRPSGEGVGGSESSLRASDPVLLRKVAEVEIPATAAAATTTTPPRSPSAGSGNRSLIEDIPEEETAPARSDDADSDNNKSASEDKANNNQHDQTTTAATANGDSNNSPVEVSFADEAQEEEAADQVERSNCDDDDQPALAEIERKNASMDDDEDDGMSSAVSAASALGQSLTPAAQEMALVSE

SEQ ID NO: 72 - DNA, 756 bp, Drosophila melanogaster
atggccacctcagtcctgctagcctgtggactcaatgagcagaaattgccaggatttgtccacatcagcgaggagtccaatgtggatgccagctttttgatcagctgcgttttgggtcagagattgcgcatctcaaatgctggaactctgctcgtctgtttgcagcatcactaccagcattattttaatgctggcatgaggttgggctataatacgaacattttccaggggaaaactctgggtgttatcgatgttctgagcgacatggccggcgagggattggcttccaaatggctaacgaataccgagggtcagacattaaccgaccagctagtagaggatattcgcgcccaggtggagaggaactatgccagtcgcaactcatatacggttctgatcgacaatctgtccatattgttcaatttgggagcaagcaagctgcaggttcagcagttctgccaggacctggctgcgctaggcaaggagcgcgaaaagctgacggtgatcaccaagctcagcaacagcgacatctaccagctgacggacaacaatgtcgccaagctcggtcaggtgcgcatccaggtgttgcgtttaaagagcggtgtcttccgtgaggtggatggcaagctgctaatcgaacgcgttctggacgaaggaaactatgcctgcgaggagacacgcaaggaggtgctctacaaggtcaacgatcgcaacgtcaaggtctttgcacccggcgaaattggggtcaaagtctaa

SEQ ID NO: 73 - protein, 251 aa, Drosophila melanogaster
MATSVLLACGLNEQKLPGFVHISEESNVDASFLISCVLGQRLRISNAGTLLVCLQHHYQHYFNAGMRLGYNTNIFQGKTLGVIDVLSDMAGEGLASKWLTNTEGQTLTDQLVEDIRAQVERNYASRNSYTVLIDNLSILFNLGASKLQVQQFCQDLAALGKEREKLTVITKLSNSDIYQLTDNNVAKLGQVRIQVLRLKSGVFREVDGKLLIERVLDEGNYACEETRKEVLYKVNDRNVKVFAPGEIGVKV

SEQ ID NO: 74 - DNA, 1956 bp, Drosophila melanogaster
atgtctaaagctcctgctgttggtattgatttgggcaccacctactcgtgcgtgggcgtgttccagcatggcaaggtcgagatcatcgccaacgaccagggtaatcgtaccactccatcctatgttgccttcaccgatacggagcgtctgatcggagatgccgccaagaaccaggtggcgatgaacccgacccagacgatcttcgacgccaagcgcttgattggtcgcaagttcgatgatgccgccgtgcagtctgacatgaagcactggcccttcgaggtggtcagcgccgatggcaagcccaagatcgaggtgacctacaaggacgagaagaagaccttcttccccgaggagatctcttcgatggtgcttaccaagatgaaggagaccgccgaggcctatctgggcaagactgtgaccaacgcggtcatcaccgtgccggcctacttcaacgactctcagcgtcaggcgaccaaggacgccggcaccatcgccggtctgaacgtgctgcgtatcatcaacgagcccactgccgctgctatcgcttacggtctggacaagaaggctgttggagagcgcaacgtgctcatcttcgatctgggcggcggcaccttcgatgtgtccatcctgtcgatcgatgacggtatctttgaggtcaagtccacggccggagatacgcatctgggtggtgaggacttcgacaaccgtctggtcacccacttcgtgcaggagttcaagcgcaagcacaagaaggatctgaccaccaacaagcgtgctctgcgtcgtctgcgcaccgcttgcgagcgtgcaaagcgtaccctgtcgtcctccacccaggccagcattgagatcgactctctgttcgagggtaccgacttctacacctcgattactcgtgcccgtttcgaggagttgaacgctgatctgttccgcagcaccatggaccccgtggagaaggctctgcgtgacgccaagctggacaagtcggtcatccacgacattgtgctggtcggtggctccacccgtatccccaaggtgcagcgcctgctgcaggatctgttcaatggcaaggagctgaacaagtcgatcaatcccgatgaggctgtggcctacggtgctgccgtccaggcggccattctgcacggcgacaagtcgcaggaggtgcaggatctgctgctgctcgatgtgactcctctgtccctgggtatcgaaaccgctggcggtgtgatgagcgtgttgatcaagcgcaacaccaccatcccgaccaagcagacccagaccttcaccacctactcggacaaccagcccggtgtgctgatccaggtgtacgagggagagcgtgccatgaccaaggacaacaacctgctcggcaagttcgagctgtcgggcatcccccccgcaccacgtggtgtgccccagatcgaggtcaccttcgatatcgatgccaacggtatcctcaacgtgactgccctggagcgttcgaccaacaaggagaacaagatcaccattaccaacgacaagggtcgtctctccaaggaggacatcgagcgcatggtcaacgaggccgagaagtaccgcaacgaggatgagaagcagaaggagaccattgccgccaagaacggcctcgagtcgtactgcttcaacatgaaggccaccctcgacgaggataacctgaagaccaagatctcggactctgaccgcaccacaatcctggacaagtgcaacgagaccatcaagtggctggatgccaaccagctggctgacaaggaggagtacgagcaccgccagaaggaactggagggtgtgtgcaacccgatcattaccaagctataccagggcgccggtttcccacccggtggcatgcccggcggtcccggaggtatgcccggagcggctggtgccgctggcgctgccggagccggcggtgctggccccaccatcgaggaggtcgactaa

SEQ ID NO: 75 - protein, 651 aa, Drosophila melanogaster
MSKAPAVGIDLGTTYSCVGVFQHGKVEIIANDQGNRTTPSYVAFTDTERLIGDAAKNQVAMNPTQTIFDAKRLIGRKFDDAAVQSDMKHWPFEVVSADGKPKIEVTYKDEKKTFFPEEISSMVLTKMKETAEAYLGKTVTNAVITVPAYFNDSQRQATKDAGTIAGLNVLRIINEPTAAAIAYGLDKKAVGERNVLIFDLGGGTFDVSILSIDDGIFEVKSTAGDTHLGGEDFDNRLVTHFVQEFKRKHKKDLTTNKRALRRLRTACERAKRTLSSSTQASIEIDSLFEGTDFYTSITRARFEELNADLFRSTMDPVEKALRDAKLDKSVIHDIVLVGGSTRIPKVQRLLQDLFNGKELNKSINPDEAVAYGAAVQAAILHGDKSQEVQDLLLLDVTPLSLGIETAGGVMSVLIKRNTTIPTKQTQTFTTYSDNQPGVLIQVYEGERAMTKDNNLLGKFELSGIPPAPRGVPQIEVTFDIDANGILNVTALERSTNKENKITITNDKGRLSKEDIERMVNEAEKYRNEDEKQKETIAAKNGLESYCFNMKATLDEDNLKTKISDSDRTTILDKCNETIKWLDANQLADKEEYEHRQKELEGVCNPIITKLYQGAGFPPGGMPGGPGGMPGAAGAAGAAGAGGAGPTIEEVD

SEQ ID NO: 76 - DNA, 3614 bp, Drosophila melanogaster
tttttttatccggcggaatttgcaaatgcaatttctggcgtttagcgcattttaagcggagttaacgcatacacagtaacaaatccggcggcaatatgtcgagctttgtgctggacaaggaggcgttcgtgcgccgtgaaacgcctctacacggaatggagggctcccagcatcggacacgatgacgcgctcaggaatctggactgcatcatgagcatcgtgggcgtcgaagaggatgtcatgtactccaagtccatggccctgcagctctggctgctgggctacgagctgacggacaccatctcagtgttctgctcggatgccgtgtattttctcactagcaaaaagaaaatagagttcctgaagcagacacagaacatcaccgaagaaggttttccggaaatcaatctgcttgttagggatcggacggacaaggaccagggcaacttcgagaagctcatcaaagccctgcaaaactcgaagaagggcaagcgtttgggcgtcttcgccaaggacgcctatcccggggagttcagcgaagcatggaagaaatccctgacggcgtccaagttcgagcatgtggacattagcactattatcgcctaccttatgtgtcccaaggatgagtcggagatcaacaacatacgcaaggcatcgctagtgtcaatggacattttcaacaagtatttgaaagatgagatcatggacattattgattcggataggaaagtcaaacacaacaagctctcagatggctgcgaggctgccattggcgagaagaagtacaccagtggtctggatcccagactcctcgatatggcctacccacccatcatccaatcgggaggagcctacagcctgaagttctccgcggtggcggacaaaaatcccttgcacttcggtgtgattgtgtgctccttgggcgcccgctacaagtcgtattgctcaaatatatcgcgcacctttctggtgaatcccaccgaggccatgcaggagaactacacatttctggtaagtgtgcaggaggagattctcaagctgctggttccgggcacaaagctgtgcgacgtctacgaaaagaccctggacttcgtgaagaaggagaagccgagtatggtggacaatgtgcccaaaagctttggtttcgccatgggcctagagttccgggagaactccattgtcatcggacccaaatgccaggcgctactcaagaagaatatggtctttaatttgcacgtgggcatctcgaatctgaccaatcccgaagccaccgacaaagagggcaagaactatgccctcttcatcggagacactgtgctagtaggcgaacaatccccagccagtgtgatgactccgtccaagaagaagatcaagaacgtcggcatctttatcaaggacgacagcgacgaggaagatgtggacgacaagaagaccgctaaagaagatcagggcaccgagatcctgggccgcagcaaggcgcaacgcggtgctggagtcaaagttgcgaaacgagatcaacacggaggagaagcgcaaggagcacagcgcgagctggctcagcagctgaacgagcgcgctaaggatcgactggccaggcagggaaactcgaaggaggtggagaaagtgcgcaagaataccgtctcctacaagtccatcagccaaatgccgcgcgaaccggaagtcaaggagctcaagctttacgtggacaagagtacggagaccgtcattatgccagtgttcggaatacaggtgccgttccatatatccaccatcaagaacatctcgcagtcggtggagggcgagtacacgtacttgcgtatcaacttctttcatcccggcgccacaatgggtcgcaacgaaggcggactctatcctcagccagagcgcacatttgtcaaggaagttacataccgcagctctaatgttaaggaacacggggaggtgggagctccatccgcaaatctaaacaatgctttccggctgatcaaggaggtgcagaagcgcttcaagacccgcgaggctgaggagcgcgaaaaggaggatcttgtgaagcaagacacactcattctgtcccagaacaagggtaatcccaagctgaaggacctatacattcggcccaacatcgtgaccaagcgcatgacgggcagcctggaagcgcacagcaatggattccgctacatctccgtgcgcggcgacaaggtggacatcttgtacaacaacatcaaaagcgcgtttttccagccctgcgatggcgagatgatcattcttctgcatttccacctgaagtacgccattatgtttggcaaaaagaagcacgtggatgtacagttctacacggaagtgggagagatcaccacggatctgggcaagcaccagcacatgcacgaccgcgacgacttggctgctgagcaggcagaacgtgagctgcggcacaagctcaagactgccttcaagagcttctgcgagaaggtggaaaccatgaccaagtcggtagtggagttcgacacgccgttccgtgagttgggattccctggagcacccttccgcagcacggtgacgctgcaacccacctcgggctccctggtcaatctgacggaatggccaccatttgtcatcacgctggacgatgtggagttggtgcacttcgagcgcgttcagttccacttgcgcaacttcgatatgatatttgtgttcaaggagtacaacaagaaggtggccatggtgaacgccattcctatgaacatgctggatcacgtgaaggagtggctcaactcctgcgacatccgctattcggagggtgttcaatccttgaactggcaaaagatcatgaagaccatcaccgacgatcctgagggattctttgaacaaggcggctggacattcttggacccggaatcgggcagcgaaggcgaaaacgaaaccgccgagtccgaagagacgaggcctacaatcccaccgacgccgaatcggatgaggagtcggacgaagattccgagtactcagaggcatcagaagacagcgaggaaagcgatgaggaccttggctctgatgaggaatctggcaaggattggtccgatctggagcgcgaggctgctgaggaagaccgcaaccacgattatgccgcagatgacaaaccacgcaacggcaaattcgattcgaagaagcacggcaagagttcaaagcacagtcgccgcgaccgcgaggaggctcgatcgtcgtcgcacagtaaaaagcacaagtgcgaactcctcctcgtcctcttcgcatttaaagtcctccagctccaaacatggcagctcatctagcccgtcgaagtcgtcgaaggacaagtacaacagccgggacaagcatcattcctcttcatcgtccggaaacaagatcagcagcaaggacaaggatcgcaagcgctcgcgggatgacagtcgcgacaatgggcacaagtcgaagaatgcgcgacattagggaggagagggagctgttcctgtcgccaagcctgtgtggcactccgttcgtaatctagctctcctgttaccattgtctatctgttaaaggacccgccaccccaatcccctgtcactcatttttgtcacgcttcaaaagttgtattacaaatt

SEQ ID NO: 77 - protein, 1083 aa, Drosophila melanogaster
MSIVGVEEDVMYSKSMALQLWLLGYELTDTISVFCSDAVYFLTSKKKIEFLKQTQNITEEGFPEINLLVRDRTDKDQGNFEKLIKALQNSKKGKRLGVFAKDAYPGEFSEAWKKSLTASKFEHVDISTIIAYLMCPKDESEINNIRKASLVSMDIFNKYLKDEIMDIIDSDRKVKHNKLSDGCEAAIGEKKYTSGLDPRLLDMAYPPIIQSGGAYSLKFSAVADKNPLHFGVIVCSLGARYKSYCSNISRTFLVNPTEAMQENYTFLVSVQEEILKLLVPGTKLCDVYEKTLDFVKKEKPSMVDNVPKSFGFAMGLEFRENSIVIGPKCQALLKKNMVFNLHVGISNLTNPEATDKEGKNYALFIGDTVLVGEQSPASVMTPSKKKIKNVGIFIKDDSDEEDVDDKKTAKEDQGTEILGRSKAQRGAGVKVAKRDQHGGEAQGAQRELAQQLNERAKDRLARQGNSKEVEKVRKNTVSYKSISQMPREPEVKELKLYVDKSTETVIMPVFGIQVPFHISTIKNISQSVEGEYTYLRINFFHPGATMGRNEGGLYPQPERTFVKEVTYRSSNVKEHGEVGAPSANLNNAFRLIKEVQKRFKTREAEEREKEDLVKQDTLILSQNKGNPKLKDLYIRPNIVTKRMTGSLEAHSNGFRYISVRGDKVDILYNNIKSAFFQPCDGEMIILLHFHLKYAIMFGKKKHVDVQFYTEVGEITTDLGKHQHMHDRDDLAAEQAERELRHKLKTAFKSFCEKVETMTKSVVEFDTPFRELGFPGAPFRSTVTLQPTSGSLVNLTEWPPFVITLDDVELVHFERVQFHLRNFDMIFVFKEYNKKVAMVNAIPMNMLDHVKEWLNSCDIRYSEGVQSLNWQKIMKTITDDPEGFFEQGGWTFLDPESGSEGENETAESEETRPTIPPTPNRMRSRTKIPSTQRHQKTARKAMRTLALMRNLARIGPIWSARLLRKTATTIMPQMTNHATANSIRRSTARVQSTVAATARRLDRRRTVKSTSANSSSSSSHLKSSSSKHGSSSSPSKSSKDKYNSRDKHHSSSSSGNKISSKDKDRKRSRDDSRDNGHKSKNARH

SEQ ID NO: 78 - DNA, 2687 bp, Drosophila melanogaster
tatcgccgccccgttgcgacaaaaaagatttaatcgaacctaaagacgtgctcgcactaaaatcgcttgaaaacaggcccgcagacctgcgaaaaacgaaaaagtgcagcgcgcatatactttttcaactgtgcccctctagcttaaaattaagtcgcggcgaaaagtcgagtaaaaaccgcggaaatgcgcatgcaaacggtgtgtggccagcaaaatcgctgccaaggcaccgcacacacactcggccacccacacatacacacttagtgctgtactcgaaaagtgcgaagacaacaggaactctgtgccaaaataatattaacagtacccagttattccattccactgcacctgtccccgaaacatcgaaatattcgcgttacgtatacgcaacgagtgctgtaaacaagtttgcacaggcgataacaatgtccaaatacgatctgctttatctaacggcgcagctaacgctggtctgctgtctgattggaatccatggatctattttgcccggaagtcatgggatcatagaatgcgagcacttcgacgagaagatgtgcaacacaacgcagcaatgtgaaacacggatagagcactgtaagatggaggcggataagtttcccagctgctatgtcctttggtcggtcaacgagacaacgggcatcctgcgcatcaagatgaagggctgcttcacggacatgcacgaatgcaatcagacggagtgcgtgaccagtgcagagccacggcagggaaacattcacttctgctgctgcaagggatcgcggtgcaattccaaccagaaatatattaaaagcaccacggaggcaaccacacaagtgcccaaggagaagacgcaggacggcagcaatttgatatacatctacattggcacctccgttttcagcgtgctcatggtcattgttggcatgggccttcttctctaccgacgccgcaagcaggcgcactttaacgagatacccacgcacgaggctgagataacaaactcatcgccattgctcagcaaccgtcccattcagctgctggaacagaaggccagtggtagattcggtgatgtgtggcaagccaagctcaacaatcaggatgtggccgtcaagatctttcgcatgcaggaaaaagaatcgtggaccacggagcacgatatctacaagctgccgcgcatgcgccatccgaacatcctcgaattcctgggcgttgagaagcacatggacaagccggaatattggctgatatccacctaccagcataacggatcactatgcgactacctcaaatcgcacacgatctcatggccagagttgtgccgcatcgctgagtccatggccaatggactggcacatctgcacgaggagatcccggcatcaaagaccgatgggctaaaaccatcgatagctcaccgagacttcaagtctaagaacgtactgcttaagagcgatctgacggcctgtatagctgactttggtttggccatgatattccagccaggcaagccctgcggcgatacacacggtcaagtaggcactcgacgttacatggccccagaggtgcttgagggtgccatcaatttcaatagagacgctttcttacgcatagacgtctacgcatgcggcctagtcctctgggaaatggtgtcacggtgtgactttgccggacccgtcggtgagttccagctgccttttgaggccgagctgggcctgaggccgtcgctggacgaagttcaggagagtgtggtaatgaagaagctgcgccctcgtttgctcaactcctggcgcgcccatccgggacttaatgtattctgcgacacaatggaggagtgctgggatcacgacgctgaggctcgtcttagctcttcgtgtgtaatggaacgctttgcgcagctaaacaagtatccctcaacccagttgctgatcaaaaaccacaccaacattgacgacgccaaggaatctacgaattgcttatagaagcggtactaagccacagaccagccagcggatctgtggctctgcaaaaaaatcagttgaagctttttgcttcgtagtggatagttgatcgtcgaggtcgtaagacgtttcgtttgtagtttaatagtttgtagtaccattataagcagctacagaatgggttgatttatacgaaagaagtcgtgtaaggtgtaacttttcctaagggaaaagctaaaagcttaacatgccaacgattttttgttattattttctttaaattataaatcgactcattcgatgttaacccgagatcttaaatctgttggaaataagtggaaacgtacactaagcaactttgaacaaagagcattagctatgtccagagacgtggtagttgctaatccgacattgacttcattgactgataaccatatatagttctatataaatcatgcatataacgtacaatttgttttgccctctggcagtagtctgtgtgcatatgtaaactgttgaaaattatcgtcaagccttttaaagtataattttatttgtacgttatcgaatgtcttcatatagtagtagttttatatttaaagttattttcaaaatagatttaacaattttagtttactttttagttgtaacgtttttatttcgcgctcaaacgtgcatgcgttttaatgttgtattttaaataaaaaatactttaaactccatcct

SEQ ID NO: 79 - protein, 516 aa, Drosophila melanogaster
MSKYDLLYLTAQLTLVCCLIGIHGSILPGSHGIIECEHFDEKMCNTTQQCETRIEHCKMEADKFPSCYVLWSVNETTGILRIKMKGCFTDMHECNQTECVTSAEPRQGNIHFCCCKGSRCNSNQKYIKSTTEATTQVPKEKTQDGSNLIYIYIGTSVFSVLMVIVGMGLLLYRRRKQAHFNEIPTHEAEITNSSPLLSNRPIQLLEQKASGRFGDVWQAKLNNQDVAVKIFRMQEKESWTTEHDIYKLPRMRHPNILEFLGVEKHMDKPEYWLISTYQHNGSLCDYLKSHTISWPELCRIAESMANGLAHLHEEIPASKTDGLKPSIAHRDFKSKNVLLKSDLTACIADFGLAMIFQPGKPCGDTHGQVGTRRYMAPEVLEGAINFNRDAFLRIDVYACGLVLWEMVSRCDFAGPVGEFQLPFEAELGLRPSLDEVQESVVMKKLRPRLLNSWRAHPGLNVFCDTMEECWDHDAEARLSSSCVMERFAQLNKYPSTQLLIKNHTNIDDAKESTNCL

SEQ ID NO: 80 - DNA, 2013 bp, Drosophila melanogaster
gaattcgtagtacccactgtcaacaattcttacgatattttactacatttgtgtagtacaattgttggtgctttaatagagtatctagtgtatacattattcacttcacaaatagatttgattcctagcatttacattcgttatacctaatttctgaaaatttaagatgttctgatgtgttggttaataggacaaagctttcacaaagcctatacaccctatatatgtacttttcaagcgccatgtgatattaataaagtaatagcattacgcatcgcatatcatcaaaaatcatacgcgcgaatgattataaatcgaagtcggcttgcattacagggggaaatcggaaggcagagacaaaatataatattatgtacatatgtacataatatagcgactgggaattaaggcgccaataagtatgcacccacacactcgcagtgcaatacatacccagcgttagctgcgccgttagataaagcggatcgtatttggacattgttaccgcctgtgcaaacttgtttacagcactcgttgcgtatacgtaacgcgaatatttcgatgtttcggggacaggtgcagtggaatggaataactgggtactgttaatattattttggcacagagttcctgttgtcttcgcacttttcgagtacagcactaagtgtgtatgtgtgggtggccgagtgtgtgtgcggtgccttggcagcgattttgctggccacacaccgtttgcatgcgcatttccgcggtttttactcgacttttcgccgcgacttaattttaagctagaggggcacagttgaaaaagtatatgcgcgctgcactttttcgtttttcgcaggtctgcgggcctgttttcaagcgattttagtgcgagcacgtctttaggttcgattaaatcttttttgtcgcaacggggcggcgatagcgatggccgataggcgataactgaccagggctggtagtgagacaatagaaatactagatacgcgcattttgcgaaaggtattttgaggtgtgcgagatctggtcacgctcacaagcaattttctggagatttcttgaagtgagttttgttgctgagaaatttaagtaaataatagaagaatcggtcaacaaagtttttttgtgcataaacataaaaaaaataattggagaccattattttgtatgaaaacagacttattaacaacagttttcacctgtcaaatgaacgtttacctttcaccaaacatggcgtcgctttacggtttattgtgtcttctcttcttttcagccaactttacgaagcaactgagaaatgactggtcgtggaaagggtggcaaaggattgggaaaggggggcgccaagcgtcatcgtaaggtgcttcgtgataacatccagggtatcaccaagcctgctattcgccgtttggctcgtcgcggcggtgttaagcgtatctctggcttgatttacgaggaaactcgcggtgtgctaaaggtacgttctggcgaaacgaagggaaagtggtgaaaaactgattaatttctcggaaaattcacaggtattccttgagaacgttatccgtgacgctgtcacctacaccgagcacgccaagcgcaagaccgtgaccgccatggacgtggtctatgccctcaagcgccagggacgcaccctttacggatttggcggttaagcacgccctctaacctccacttgataaataaccatggagttaacttaactacattcaaaatacttgatccaattgaatcttaatcagtagtattcaacgcaaacttaaccgaacgcaaatattttataatttcacaatatacggactaaataaatcaaaagatatcacatagagaactcaatatcatgcatatgtgcattttcacttggggcggttaatcatccgaaaataaggtccaacaaactcgcttagggagcacacaaataataaatctttaatggaaattagtaagaccaaagtatatttttgtacatttttggtgcagcttgaattc

SEQ ID NO: 81 - protein, 103 aa, Drosophila melanogaster
MTGRGKGGKGLGKGGAKRHRKVLRDNIQGITKPAIRRLARRGGVKRISGLIYEETRGVLKVFLENVIRDAVTYTEHAKRKTVTAMDVVYALKRQGRTLYGFGG

SEQ ID NO: 82 - DNA, 1398 bp, Drosophila melanogaster
tacctatattgtttctaactcggtcaccttggttctcatcactttttgttctggtttcacggtgcttacatacggttttggtagttagtactaccgttgaccctctgataacattgattaggccttaatttcgggtctatagcccaaccgccgccgtcctgaccacaggtcaagcactaacctcatgggtgacatgacgctggctttttcttgatacacgaggtttggcacctgacagactaggcagcttactgaggcctcgtcgcgctgttaacagattaacaatataagcacccactttgattcgacgtcaagcggttcaagtatcattcccttgacgcacacttagtaagctgcgtatacgttcgaccggattagctacagtaacgcggtgggaacttaatgatagggttgaagagctctgaggtgtagtgcgacttgctactaggcgtcgctcaagtcacctcctggtttgtcttagacctgatgtatatggactacaggatacgattctcgtccccaaacatgatggacgttgacctcctgctacactaccgcttgcacccaaagtacctgatgtaggtcttcaaacgtcatgacgtaccgtcgaaagcctaacgggtcgtctagctaacctaacactactcgaagtcactcgacccgaagtatcccttcgagaaggcgtggaggcacgactcgagtaagcaccgcatggagttcaacaagatgttactggtcgggtaactgaccgacgaggtctcgaagcactgggacgtctcgacagcgaccctatcacaaaggctagggcttacagtcgccctgaagctcaggtctgacgacgcgaggagcgttagggtcaaagtcgtatacccacgtgttagcagtaaccgcctattcgtcgttatagttttcctacggaagaaattggtattgaaacgttccgtcgcgaactccgtagacgctgtcggcgagttggactagcggtgagtagctttgagcgacaacttcgtattagagctggaccatctccccctttgcaaatagacctagatatacggtgcctacgggttctactacttcatagactattggttagtcaagttcgtctgcgtcgaagtgtatgcgttacgcttcctgtgtcgggtattagaccggctcaagttataacttaaccagttccctagcgggtgtgaccaccgtttgtcgaggagctgttccgtcacacctaagcagtactcagtgtggcaggttagcaaacgtctttccctaccttttcgcctcgaagggatattaatatacatgatgatgtaattcctcctcgggctccccgagtcgaccaaggcagctaaggcaacccggaggttacgtaggagaaaggtgctcgatgctaggtgttac

SEQ ID NO: 83 - protein, 466 aa, Drosophila melanogaster
MDITKIEPVEPRVVKNKTKVPRMYAKTINHDGNWETIVTNPELKPRYRVGGGRTGVQFVIGVPTVLRPKKNYVLQTVDCLIRRMTPEQRDNCLIVIFVGETKLQFAKFIVRELRVNHSTHMQAGLIDVIAPPLNYYPNFSRLHITLNDDPQRVQWRTKQNLDYIYLMSYAKSRGLYYLQLEDDVMANVGFMDYIQKFAVLHGSFRIAQQIDWIVMSFSELGFIGKLFRTSVLSSFVAYLKLFYNDQPIDWLLQSFVTLQSCRWDSVSDPECQRDFESRLLRSSQSQFQHMGAQSSLADKQQYQKDAFFNHNFARQRLRHLRQPLNLIATHRNSLLKHNLDLVEGETFIWIYMPRMPKMMKYLITNQFKQTQLHIRNAKDTAHNLAEFNIELVKGSPTLVANSSSTRQCGFVMSHTVQSFAERDGKAELPYNYMYYYIKEEPEGLSWFRRFRWASNASSFHELRSTM

SEQ ID NO: 84 - DNA, 573 bp, Drosophila melanogaster
attcttttctgtaatctcggcgacaatggcggctaacaaggagaggactttcatcatggtcaagcccgatggcgtccagcgcgggctcgtcggcaagatcatcgagcgcttcgagcagaagggcttcaagctggtcgccctgaagttcacctgggcctccaaggagctgctggagaagcactacgctgatctgtccgcccgccccttcttccccggactcgtgaactacatgaactccggccccgtggtgcccatggtgtgggagggtctgaatgtggtcaagaccggtcgccagatgctcggcgccaccaaccccgccgactcgctgcccggcaccatccgcggtgacttctgcattcaggtcggacgcaacatcatccacggctccgatgccgtcgagtctgccgagaaggagatcgccctgtggttcaacgaaaaggagctggtcacctggaccccggccgccaaggactggatctacgaatagacggctactttaactgtctgccctcgtctaagctgaatacagattgattcttctaaagaaataaaattccacaataattactatat

SEQ ID NO: 85 - protein, 153 aa, Drosophila melanogaster
MAANKERTFIMVKPDGVQRGLVGKIIERFEQKGFKLVALKFTWASKELLEKHYADLSARPFFPGLVNYMNSGPVVPMVWEGLNVVKTGRQMLGATNPADSLPGTIRGDFCIQVGRNIIHGSDAVESAEKEIALWFNEKELVTWTPAAKDWIYE

SEQ ID NO: 86 - DNA, 2509 bp, Drosophila melanogaster
caatttattgtatgagtcaaaaaactgaaagaccagtgctatcgggtcaacgcatcaagaccagaaaaagagatgaaagagaaaaatatgacccaacgggattccgtgatgcggtcattgctggtctcgaaaaaactgaaggcgacctggaacaaatctctaaatatctagacagcgcgggcaacaagctcgactatcgtcgctacggtgaagttctctttgacatattgattgcaggaggtctactaggtaagttttccgctgcaagtaatgtgtttagtctcttcactgacccttttccatcctcgtttcaattgcagtgcctggtggttctatatctcaggatggcgaaaagccgcgcacaagctactgcatcttcgatgcgcccgagagcatggagagcatgcgcaaccatgagcaggtttgtaatcttttagcaggtcatacttaaattatgattatgagtaaacgaaaattggtttgattgcaacacaagttgagctcttgttgttttccaagctaaaacgtttatttactactaaatgattttcttcggatccacttaaaagtatgaaattcgtgaagtggctgcatatcattagagctgactataaagtttcaaaaatgtaatcggtgtcaagaatatgcaataacaatcaacacatttacttgtctttggtttgtcctaaacactaacgttctgaagatttcttatgtgtcaacaactactctttattcaacactatatatatatactatatgcatgcaaccactgcgaaggtcacgctattgaatcaaagtgcatattattagaaccggttatgcatctcaacaactcaatcggtgtcaaaatatgcaaaataaaaagccacattttacttgtctttattttgtaaaattactaccgccagcaatctaaagatttctaatgttgcaacaacaaatacaaaagcctcctgcgtgagaacacagtaaaatttcaccatccgctaacaggggcaatcacactttaccttttccaggtatttgtcaagctcatcagacggtacaagtaccttgagaaaatgttcgaagaggagatgggaaaggttctattattcgtaaagggctttactcctagtgaacgcatcaagcttgcgcgtatgacagcgctctggttaggtaagtcttaacatttatgttcctgttcctcctgtgcattgcttgcgtctgcccattcggtctttcaattagttgtttcgataaacacttgttcaacttgcagctgaggggctaaagtaatccttcacttggtatactgactcttggatgaactaaccacatctaagggccacgagcccaaggacaggattgctagccggccgtctaaacttgttttgcgaaaacatttgactaaccctatatttaaccctatttttgatcaacagtcaacggttctgtaccgccaaatgttttactggtactaaacaacgagcacctaatcaaggatggcattgcattggagtttctactagagctgttccagacgttcaagcaagagaagggcattgcatatctgattcaggcgcttaagaagggtggactggaaagcaagtaagtttttagttgtgatttgtttttagccccggaatgttctcaggaagatgactcaatgatccagttgtgcatctttaattgatattcctagagtaagaaagttcgacggagttttacccaattcgcaaatgacctttcgcttcatttgggtgctgatttaatttcgtacacctcaatacgtcatttaaggttgattattgaatgcgttaacttaaattattaataatggttccactttttcacgtttttccagacttatggactttttcccaccgaacaaacgtactgaggaatattttaaacaagtttttcttgacaaagaacttaacgagatcgtcaagctacataaggctcaggctagccaggaggcgaagcgtgagttgcagcaggcgctcatcgatgatatcaacgatgagaagccatataatgagataacctcagacattaaggacttctcgcagcgcaccaacattcccgatcatgaaataattgttattgtaagtcgatgcgtaaataatccaactggatgatttccttactaaatctcatgtatgatctttaccagatttggtccaccatcatgtcattgggcgaatggaacaagaaggaggagctggttaccgatcaggctgttcgtcatctgaagaactactgcccactgttgcaggctttcgcctcgaccgaccgttcggaattggccctaatcttgaaggtgcaggaattctgctacgagaacatgaacttcatgaaggccttccagaaaatcattttgttgttctacaagaccgaggtcctgtccgaggagatcatcttgcgctggtacaaggagggccactcaaacaagggcaaaatgcatttccttgaacaaatgcgaaagtttgtcgaatggcttcagtcagccgaagaaggttag

SEQ ID NO: 87 - protein, 414 aa, Drosophila melanogaster
IYCMSQKTERPVLSGQRIKTRKRDEREKYDPTGFRDAVIAGLEKTEGDLEQISKYLDSAGNKLDYRRYGEVLFDILIAGGLLVPGGSISQDGEKPRTSYCIFDAPESMESMRNHEQVFVKLIRRYKYLEKMFEEEMGKVLLFVKGFTPSERIKLARMTALWLVNGSVPPNVLLVLNNEHLIKDGIALEFLLELFQTFKQEKGIAYLIQALKKGGLESKLMDFFPPNKRTEEYFKQVFLDKELNEIVKLHKAQASQEAKRELQQALIDDINDEKPYNEITSDIKDFSQRTNIPDHEIIVIIWSTIMSLGEWNKKEELVTDQAVRHLKNYCPLLQAFASTDRSELALILKVQEFCYENMNFMKAFQKIILLFYKTEVLSEEIILRWYKEGHSNKGKMHFLEQMRKFVEWLQSAEEG

SEQ ID NO: 88 - DNA, 3902 bp, Drosophila melanogaster
tgacaaaaaataaaaaacgaaatccatcgtgaacagttttgtgtttttaaatcagttctaaacacgaaaagggttgatgaaaaacgcagaagaatccgaaaaactaactaaccgagcaaaaacttgacttgagtgttgtttgacaaatcaggaaagataaaaaacaaatcataagaaaaaactgcacgaaaaatgaaaaagtttctaatattcaaaatcttgcacaagaaatacaaaatcaattaaagtgaactctaaccaaaagttgtacacaaaataaaaagcaaaacaaagcagcgaagaacaatcacaagaagagcaaagtgccaacaaagtgcaggaaggaaggaagcggataaggacaaaaaggaagccagcacacacacacacacccacacaatggccgtgcccttttatttgcccgagggcggcgccgatgacgtagcgtcgagttcatcgggagcctcgggcaactcctccccccacaaccacccacttccctcgagcgcatcctcgtccgtctcctcctcgggcgtgtcctcggcctccgcctcctcggcctcatcttcgtcatccgcatcgtcggacggcgccagcagcgccgcctcgcaatcgccgaacaccaccacctcgtcggccacgcagacgccgatgcagtctccactgcccaccgaccaagtgctatacgccctctacgagtgggtcaggatgtaccagagccagcagagtgccccgcaaatcttccagtatccgccgccaagcccctcttgcaatttcactggcggcgatgtgttctttccgcacggccatccgaatccgaactcgaatccccatccgcgcaccccccgaaccagcgtgagcttctcctccggcgaggagtacaacttcttccggcagcagcagccgcaaccacatccgtcatatccggcgccatcaacaccgcagccaatgccaccgcagtcagcgccgccgatgcactgcagccacagctacccgcagcagtcggcgcacatgatgccacaccattccgctcccttcggaatgggcggtacctactacgccggctacacgccaccacccactccgaacacggccagtgcgggcacctccagctcatcggcggccttcggctggcacggccacccccacagccccttcacgtcgacctccacgccgttatcggcgccagtggcgcccaagatgcgcctgcagcgcagccagtcggatgcggccagacgcaagcgattgacctcgacgggcgaggatgagcgcgagtaccagagcgatcatgaggccacttgggacgagtttggcgatcgctacgacaactttacggccggccgggagcgtctgcaggagttcaatggacgcatcccgccccggaagaagaagagctccaatagccactcgagcagcagcaataatccagtctgccataccgacagccagtccggtggtacatcccaagcggagagcggtgccatccatggccacatcagtcagcagcgacaggtggagcgagaacgacaaaaggcgaaggccgagaagaagaaaccacagagcttcacttggccaactgttgtgaccgttttcgttttggccatgggctgtggcttctttgcggcgcgatgaaagcgcaggagacgtgtaatcgaatgatctatagtgaaatcagctagcccttaagatatatgccgatctaaacatagttgtagttaaaccgtacataagtgcaacgaatttattgaactgcaggagcgaaagcagaaagtcattaattcgtaaacggattgttagatacacaaacagccaacatacacgaagagtgtgcctaagattaagaaggttgacgggacacaagaacaatatattctatctgtctatggtaactgcatttgtatttctaaaacgaaacgaaagataacaatcttaactgctcaaagtaatgaaaactcttagactggcaagagactcaaatcacacttatttttttgctgatccatatttttgtacaaccttttgagcgatatttacaaattatactagtacaaaaaaaagagagagagagataagcaaaagaaaactgccacttttgagatacttttgataatctttgatttgcatttaatcatttccacacttgcattttttataaacaacaaacaaaattacttccattgtagaacaaagtaaactgcaatttcaatgtcttcgcatttgtaattccgaattgcaagaaaaacaaaaatattttaaatatgtttaactagtagaattttttaaacgtaagtccacaaaaacaagcacatctagctttaattgttgaaacaaaagcagaaaaaacgcaacaaaaaaatgaatgaaaatcattaaattaattttgtatatagtttttatgccatttttgtgatgttttgtgtctacggtttatgtcatgttattttagttaaatttcttatgatttatgtttatttgtaatattttttgtcattgtttgttcatcatcatattcaaattggtctcacaatataatagttttaagctccacgcccgggagattgatggcaaaacgattgaaatttggccagaagagagatagttttccccattcgtacacagtcttttttggaatgcacattaatgatctctcacaatggaaattaatgaaaattgatctccgcagctagccaaagttaaaaaagaaatgaagaggaaaacatattctataggcaattttcactatatgctagaatttcccgggcgtttcaatgctaatcgaatacagtgacatgaaagcaaacatagcgaaaatattaagaaaatcaatcaaaaagaaagaaaaaccaattcccaaaaatcgcattgatctcatggatttatacaatacaattacatcaaccgtttttttacaatgagaaatgttataaaaagcagaaagtgaaacacagaaacataaacaaaaattaacgaaaagcttagatataagttcgccaagcgttttagttctattttctagaatgtctaagtcggtttagtgagtttattaagctgtcttcggacacaagtttatttgtatataagcaatattatttgtgtagcctaagtgacagtcccaatcaaatccaatccaatatcacccagtcccggacatttcccagcaaaacaatagactattctcgcgttcacatgtatcaatcttaatttgaattaccacaaaatgaaatgaaatactaaaaccatacacaaatgaaaaattatttttgtaaattgtttgcatcaagtgagcaaggggattagattaaggaatcatccttgctttatcccctgcttattgctaattagttttcacaatgatctcggtaaagttttgtggccttgcgcccaaaagtcgtacagatttttggtttgccataaatactcgaacaaaaagttaatgaaaaacgaagcaaatggaaaaaaaatcagaatgaaacacaagaaatttatatttttgacccaatgctacttaatccgtttttgtaatttaagtatctttactcgaccttgtatatagcgcagttcgaatcacagaatcaaatgccatttttgtatagaattttatttggtgccaaaacagtgacagataattaaatgtctatgaacccgtgtatttcgcatattatacatttatacatatatcgtaacttcaatgataagtttgattctgaaattttgtcaactcaatttaagaaacatttctgttgtagtttagtgattgctagcagaaagcactttgtttaattgtacattttatattatgctgtaatattttaatatacataaatatcattattgatctcatgaatatgttcataagacaacaaaaattatatatatgaatacatctatgtgtatgtgtaaag

SEQ ID NO: 89 - protein, 410 aa, Drosophila melanogaster
MAVPFYLPEGGADDVASSSSGASGNSSPHNHPLPSSASSSVSSSGVSSASASSASSSSSASSDGASSAASQSPNTTTSSATQTPMQSPLPTDQVLYALYEWVRMYQSQQSAPQIFQYPPPSPSCNFTGGDVFFPHGHPNPNSNPHPRTPRTSVSFSSGEEYNFFRQQQPQPHPSYPAPSTPQPMPPQSAPPMHCSHSYPQQSAHMMPHHSAPFGMGGTYYAGYTPPPTPNTASAGTSSSSAAFGWHGHPHSPFTSTSTPLSAPVAPKMRLQRSQSDAARRKRLTSTGEDEREYQSDHEATWDEFGDRYDNFTAGRERLQEFNGRIPPRKKKSSNSHSSSSNNPVCHTDSQSGGTSQAESGAIHGHISQQRQVERERQKAKAEKKKPQSFTWPTVVTVFVLAMGCGFFAAR

SEQ ID NO: 90 - DNA, 651 bp, Drosophila melanogaster
tacaaatgcttttagaaagcgcgacactattagcctcgggggccgagcccgtttccttgataaagccttaactagacgttcttggtacctacacacgtgtagaggtgccccctgtaagacgcggtcttgtagtattttttgtgtcttgaaccttttttccggttcgtcatgtaacgacttccatttgaccacgggctgcgctaacactggttctgctacgaccgggcctattggctccatccgttgtccagcatgtaggatctgcctaagggcgcgttatatcgggtccggctccgtgaccgacgtgcgctcgtttagctacggcactagtgcgacctgcaaggtgtatcacactaatagctggcccagttcttagcgacctaggtacgcgggaggccgtcccacatgttataaccgaagttcttagggtttcacggaccgtttctactacactgccccctcggcgactacgttgcgcttctactatttggggtacaccaccggttcgctgacctcgagatgctactccactactcgggccattatcggaccatgcttttcttcccagaccaacggtgaaagttcccttttgtctgtttcctctagaccggctactacctcgaaaaggagttgctggcgtatttacgcatt

SEQ ID NO: 91 - protein, 216 aa, Drosophila melanogaster
MFTKIFRAVIIGAPGSGKGTISELICKNHGCVHISTGDILRQNIIKNTELGKKAKQYIAEGKLVPDAIVTKTMLARITEVGNRSYILDGFPRNIAQAEALAAREQIDAVITLDVPHSVIIDRVKNRWIHAPSGRVYNIGFKNPKVPGKDDVTGEPLMQREDDKPHVVAKRLELYDEVMSPVIAWYEKKGLVATFKGKQTKEIWPMMELFLNDRINA

SEQ ID NO: 92 - DNA, 5607 bp, Drosophila melanogaster
tcagtcagtcaacggccgtcggcaagacaacaacgtgcgcggctaaaaaaccaacagcagcacaggcgaccacgacaacagccaagaactcgaactcgaactcgaacgtgaacgtgaacgtgaacgtgaattcaaacggtagcggaaacggaaacgcgaacagtaaagtgaatcgtcgttcgcgtcaaagatccttgagcaaagacattaacaatcagccagcgagcagtaatagcaatagcaacagtagtaacaacagcagcaacagcaacggcggagcaacggcaaccgctgctggcttcatgagtagcgctgccgcggctgctgcgggtgccgctggtggaggagccctgttccaaccacaatcggtcagcacggccaatagcagtagtagtaacaataacaattcaagcacaccggctgctcttgccacccattcgcccacgagcaactcaccagtttcgggcgccagttcggcatcgtccttgttgacggccgcctttggcaacctgtttggtggctcctcggccaagatgctgaacgagctgtttggccgccagatgaagcaggcccaggacgcaacgagtggcctgccccagagtttggacaacgccatgctggccgccgccatggagacggccaccagtgccgagctgttgatcggcagcctcaattccacgtccaagttgctgcagcagcagcacaataacaacagcattgctcccgccaatagcacgcccatgagcaatggcacaaatgcatcgatctcgccgggatcggcccacagttccagtcactcgcatcagggagtctcgcccaaaggaagtcgcagggtgtcggcctgcagtgatcgctccttggaggcggcagctgctgatgttgctggtggctcgccgccacgagcggcatcggtgagctcgctgaacggaggagccagcagtggggagcagcaccagtctcagttgcaacacgacctggtggcacatcacatgctgcgcaatatactgcagggcaagaaggagctgatgcaactggatcaggagctgcgcaccgccatgcagcagcagcaacagcagctgcaggagaaggagcaactgcactccaagcttaacaataataataacaacaatattgctgccaccgccaacaacaataacaacaccacaatggagagtatcaatctgatcgacgattcggaaatggctgacatcaagatcaagagtgagccccagacggctccgcagccacagcaatcgccgcacggaagcagccacagcagccgaagtgggagcggcagtgggagccacagcagcatggccagcgatggcagcctgcgacgcaagtcctccgactccctggacagccacggggcgcaggacgatgcgcaggacgaggaagatgctgcgcccactggccagagatccgagagcagggctccggaggagccacagctgcccaccaaaaaagaatccgtggacgatatgcttgacgaggtggagctcctgggtctgcactcccgcggatccgatatggatagcctggcctcgcccagtcaatcggacatgatgctgctggacaaggacgatgtcctggacgaggacgacgacgatgattgcgtggagcagaaaacatccggcagcggatgtctcaagaaacccggcatggacttgaagcgcgctcgcgtcgagaacatcgtgtcgggaatgcgatgcagtccatcctccggattagcgcaggcaggacaactgcaggtaaatggttgtaagaagcgcaagctctaccagccccagcaacacgccatggagcgttatgtggccgccgcagctggtctgaatttcggcctcaatctgcagagcatgatgctcgaccaggaggacagtgagtccaatgagctggagtccccgcaaatccaacagaagcgtgtggagaaaaatgcgctcaagtcccagctgcgatccatgcaggagcagctcgcggagatgcagcagaaatatgtgcagctgtgctcgcgcatggagcaggaatccgagtgccaggaacttgaccaggaccaggatgtggaacaagaacaagagccggacaatggcagcagtgatcatatcgagctgtcgccctcgcccactttgaccggagatggtgacgttagtcccaaccacaaggaggaaactgggcaggaacgacctggttccagctcaccctcaccatcgcccctaaaacccaagacatcgctgggcgagagcagcgactcaggcgctaacatgctatcccagatgatgagcaagatgatgtccggcaagctgcacaatccactggtgggtgtgggtcatcccgccctgcctcaaggatttcctccactgctccagcacatgggcgacatgtcgcacgcagccgccatgtaccagcagttcttcttcgagcaggaggcgcgcatggccaaggaagccgccgagcagcagcagcaacagcagcaacagcaacaacagcagcagcagcaacagcagcaggagcaacagcgccgcttcgagcaggagcaacaagagcagcagcgacgcaaggaggagcagcaacagcagatccagcgccagcagcagcatctgcaacagctgcagcaacagcaaatggagcagcaacatgtggccactgccgcccccaggccgcagatgcaccacccagcgcccgcccgcctgcccacacgaatgggcggtgctgctggccacacggccctcaagtccgaactgtcggaaaagttccaaatgctgcgcgccaacaacaatagctcaatgatgcgcatgtcgggcacggacctggagggactggccgatgtgctcaagtccgagatcaccacctcgctgtccgctctggtggacaccattgtgacccgcttcgtccaccaacggcggctgttcagcaagcaagcggactccgtgaccgcggctgccgagcagctgaacaaggacctgctgctggcttcgcagatcctcgaccggaagtcaccgcgcaccaaggtggcggacaggccccagaacggacccacgcccgcaacacaatcagcggctgccatgttccaggcgcccaaaacgccacagggcatgaatccggtggccgccgccgcgctctacaactcgatgaccggacccttctgcctgccgcccgatcagcagcagcagcaacagaccgcccagcagcaacagtccgcccagcagcagcagcagagctcgcagcagacacaacagcagctggagcagaacgaggccctcagcctggtggtgacaccaaagaagaagcgccataaggtgaccgatacgcgcatcacgccgcgcaccgtcagccgcattcttgcccaggatggcgttgtgccgcccaccggaggcccaccgtcaaccccccagcagcagcaacagcagcagcaacagcaacagcagcagcaacaacagcagcagcaacaggcgtcgaacggcggcaacagcaatgccacgcccgcccagagtccgacgaggagcagtggaggagccgcataccatccgcaaccaccgccaccaccaccacccatgatgcccgtgtccttgcccacctccgtggccatacctaatccctcgctgcacgagtccaaggtcttttcaccgtactcgccgttcttcaatccgcacgcagccgctggccaggcaacggcggcccagctccatcagcaccaccagcagcaccacccgcaccaccagtccatgcagctgtcctccagtccgccgggcagcttgggcgctctgatggactcgcgcgactcgccgccgctgccccacccgccgtcgatgctccatcccgccttgctggccgccgcccatcacggcggatcgccggactacaagacctgcctgcgggccgtcatggacgcccaggatcgccagtccgagtgcaactcggccgacatgcagtttgacggcatggctcctactatatccttttacaaacaaatgcaacttaaaacagaacaccaggagtcgctgatggccaaacattgcgaatccttgactcctttgcactcttctacattgacaccgatgcacctgcgcaaggccaagctgatgttcttctgggtgcgctatcccagctccgcggtgctcaagatgtacttcccggacatcaagttcaacaagaacaacacagcacaattggtgaaatggttctcgaacttccgagaattctactacatacaaatggagaaatatgcacgacaagctgtcaccgaaggcatcaagacacccgatgatctgttgattgctggagatagtgaattgtatcgcgtgctcaatttgcactacaatcgcaataaccacattgaggtaccccagaatttccgcttcgtggtcgaatcgactctgcgggagttcttccgtgcaatacagggtggcaaagacaccgagcagtcgtggaagaagtccatatacaagatcatctcgcgcatggacgatcccgtgcccgagtacttcaagtcgcccaattttttagagcagctggaataagtggaggagttggcgctgccgacgctgccattgccgcatccactgggaatgccaccgcccatcagtccggccagcacctccaccacctgcagcaccgctaccaccaccaactccaggcccggcagcagccatccgaaggcgaagcgcaggccaaagctaaaaggctaaacctgcgcaggaaacacgactggatatgaccaactacccagcaaataaaatcgaggataaccaattcgacaaacagtatccacacacagggcagaaacttagacatagctgagagatttgcaatagcacacgagtcgaaaacgcgtttagaaaacacattgagcaaaatattttttcaaaaatttccaaaaactacacaactaaacacacacacaaaaatacaatttcaaaacacatgaacctcagcaaaagagcgacaagaaaaaagaagcatgtgggccacggatatacaaatccagtgggccgattgagcaaaaccaaaacttaacatagagcagcaagtcttaatctaataatgtgaaatagtgcaaattgaaagaaaacctgagccacacacctgagaacacccacacaccgagcgtaatttacaggcagtgtaaactgtactcgccgttggtttgttagttgaaatttttttgaaaatatttacagcagattacgtatacgtatgaatatttaacaaatagttgagccgtctaatgatctaccgaaagttgacacacattccacaaggaaatacctacacaataaccacacgcattccacgcacacgcacacacacacacgctcgcatcggtacaaagtgtgtgttcatttgagagagagagagagagagagagaaaatcgctcggccaaacaggaagtggtttttatcgcactgcttggccgaccgactttccggtaagcagtttccaccgcccggttgcacactgctttacaaaagcaggcgcagctctgacggacggaaatcgggaattaatcttaaatgtttaaaagtcacccgatcactaaggttgctacttccctttatcccacatttaagcgctaagcatatattcgatgtctattaagcgaaactaaaagc

SEQ ID NO: 93 - protein, 1403 aa, Drosophila melanogaster
MSSAAAAAAGAAGGGALFQPQSVSTANSSSSNNNNSSTPAALATHSPTSNSPVSGASSASSLLTAAFGNLFGGSSAKMLNELFGRQMKQAQDATSGLPQSLDNAMLAAAMETATSAELLIGSLNSTSKLLQQQHNNNSIAPANSTPMSNGTNASISPGSAHSSSHSHQGVSPKGSRRVSACSDRSLEAAAADVAGGSPPRAASVSSLNGGASSGEQHQSQLQHDLVAHHMLRNILQGKKELMQLDQELRTAMQQQQQQLQEKEQLHSKLNNNNNNNIAATANNNNNTTMESINLIDDSEMADIKIKSEPQTAPQPQQSPHGSSHSSRSGSGSGSHSSMASDGSLRRKSSDSLDSHGAQDDAQDEEDAAPTGQRSESRAPEEPQLPTKKESVDDMLDEVELLGLHSRGSDMDSLASPSQSDMMLLDKDDVLDEDDDDDCVEQKTSGSGCLKKPGMDLKRARVENIVSGMRCSPSSGLAQAGQLQVNGCKKRKLYQPQQHAMERYVAAAAGLNFGLNLQSMMLDQEDSESNELESPQIQQKRVEKNALKSQLRSMQEQLAEMQQKYVQLCSRMEQESECQELDQDQDVEQEQEPDNGSSDHIELSPSPTLTGDGDVSPNHKEETGQERPGSSSPSPSPLKPKTSLGESSDSGANMLSQMMSKMMSGKLHNPLVGVGHPALPQGFPPLLQHMGDMSHAAAMYQQFFFEQEARMAKEAAEQQQQQQQQQQQQQQQQQQEQQRRFEQEQQEQQRRKEEQQQQIQRQQQHLQQLQQQQMEQQHVATAAPRPQMHHPAPARLPTRMGGAAGHTALKSELSEKFQMLRANNNSSMMRMSGTDLEGLADVLKSEITTSLSALVDTIVTRFVHQRRLFSKQADSVTAAAEQLNKDLLLASQILDRKSPRTKVADRPQNGPTPATQSAAAMFQAPKTPQGMNPVAAAALYNSMTGPFCLPPDQQQQQQTAQQQQSAQQQQQSSQQTQQQLEQNEALSLVVTPKKKRHKVTDTRITPRTVSRILAQDGVVPPTGGPPSTPQQQQQQQQQQQQQQQQQQQQASNGGNSNATPAQSPTRSSGGAAYHPQPPPPPPPMMPVSLPTSVAIPNPSLHESKVFSPYSPFFNPHAAAGQATAAQLHQHHQQHHPHHQSMQLSSSPPGSLGALMDSRDSPPLPHPPSMLHPALLAAAHHGGSPDYKTCLRAVMDAQDRQSECNSADMQFDGMAPTISFYKQMQLKTEHQESLMAKHCESLTPLHSSTLTPMHLRKAKLMFFWVRYPSSAVLKMYFPDIKFNKNNTAQLVKWFSNFREFYYIQMEKYARQAVTEGIKTPDDLLIAGDSELYRVLNLHYNRNNHIEVPQNFRFVVESTLREFFRAIQGGKDTEQSWKKSIYKIISRMDDPVPEYFKSPNFLEQLE

SEQ ID NO: 94 - DNA, 601 bp, Drosophila melanogaster
cggttagcgtcatgcctttcgagagattcgtacaaactggtcgcattgccaaggcctccgccggtcccctgaaggggcgcctggtggccattgtcgacgtcattgaccaaaacagagttctggtagatggtcctctgactggcgtgccccgtcaggaatacagattgaacaatctgcatctgaccaagtaccgcatcaagttcccctacaccgcgcccacgcgcatcgtgcgcaaggcctggacagagagcgacctgaaggcccagtggaaggtcagcccctggtccgtcaaggcacagaacatctgcaagcgctcctcgttgaacgactttgaccgcttcaagctgcgttatgccaagcgccagcgcaacaagctgctgaccatcgccttcaacacactgaagaagcgcaccaaggctgacggcactccccgcgtcctcaagaaggatcgtcgcgagcgtctgcgtgccgagaaggccaagggtggcaagaaggccgcggccaagaagtaaaaaatactacctttaacgaaagtaactgcttgatgaacatccaccaccatggagaaaataaaagaaagtgttatttttaggaaaaacac

SEQ ID NO: 95 - protein, 166 aa, Drosophila melanogaster
MPFERFVQTGRIAKASAGPLKGRLVAIVDVIDQNRVLVDGPLTGVPRQEYRLNNLHLTKYRIKFPYTAPTRIVRKAWTESDLKAQWKVSPWSVKAQNICKRSSLNDFDRFKLRYAKRQRNKLLTIAFNTLKKRTKADGTPRVLKKDRRERLRAEKAKGGKKAAAKK

SEQ ID NO: 96 - DNA, 528 bp, Drosophila melanogaster
tcctcatgctccgcctgacaaaaccaaacatgtcgctactcttgttgcacgacgacttccgtttgctcggcctctgttgccggcggtggttcgttgttgtagtcggtgtcaaagtcgtcgttgtcgttgtcgttgtcgttgtcgttgtcgtggtagtagttgtggtcgttggtggcggctcgtcgttgccagtgtgcagtggttatgggagtgttcagttgccgctgccgtcgcgccgcttaacgccgctctcgccgttctgattatggttatgtccgtcggtgtcagtgtcgttgtcgccgttgtggttgtgtctgcgtctgttcctcgttctcgctctcttccgtttcctctttcgcttgcttctcctcaggctcctaaggctgctgctgcagcaccaacatgagcttccgacgcttccgttgcggtcgtcgtcgtcgtcgtcgtcgttgtcgttgtcgttgcggtcgtcgttgttggtattccgtcgccggtgctgctgctgctgccgctgctgccgcttggtaa

SEQ ID NO: 97 - protein, 175 aa, Drosophila melanogaster
EYEADCFGLYSDENNVLLKANEPETTAATKQQHQPQFQQQQQQQQQQQQHHHQHQQPPPSSNGHTSPIPSQVNGDGSAANCGESGKTNTNTGSHSHSNSGNTNTDADKEQEREKAKEKANEEESEDSDDDVVVVLEGCEGNASSSSSSSNSNSNASSNNHKAAATTTTTATTANH

SEQ ID NO: 98 - DNA, 1962 bp, Drosophila melanogaster
catttcgagcggaatttgcgaatattatacttggccgctatttaacgacgatcttgcccagagaatgccgcgtgtagccaagccgaaagccgccgctccggccaagaaggtggtgtcggccaagaaggccaagagcaagctgtacaagatgccggagaaggtgaaggagggcacagttttcaccgatttagccaaaggccagtggcgcattggaccctcgatcggagttggaggattcggtgagatctacgcggcttgcaaagtgggtgagaagaactacgatgctgtggtcaaatgcgagccacatggcaatggtcctctgttcgtggagatgcacttctacctgcgcaacgccaagctggaggacatcaaacagttcatgcagaagcacggtctcaagtccctgggcatgccctacatactggctaatggttccgtggaggtcaatggtgaaaagcatcgatttatagtcatgccgcgctacggcagcgatttgaccaagtttctggaacagaacggcaagcgactgcccgagggcactgtctaccgactggccattcagatgctggacgtctatcagtacatgcacagcaacggctacgttcatgccgatcttaaggcagccaacatactgctgggcctggaaaaaggcggcgctgcgcaggcgtacctggtggatttcggcctggcctcacacttcgtcaccggtgacttcaagccggaccccaagaagatgcataatggcaccatagaatacacatcaagggatgctcatctgggcgtgccaaccagacgagctgatctggagatactcggttacaatctcatcgagtggctgggcgcggagttgccgtgggtcacgcagaaactactggctgtaccccccaaagttcaaaaggccaaggaagcatttatggataacataggcgagagtctgaagacgctgtttccgaagggagtgcccccgccaattggggatttcatgaagtatgtctcaaaactaacacacaaccaggagccggactacgacaagtgtcgcagttggttctcaagtgcgctgaagcagctgaaaattccaaacaacggagatctcgactttaagatgaagccacagaccagcagcaacaataatctaagtccgcccggcacgagcaaggcagcaacagccaggaaagcaaaaaaaattgattcgccagtcttgaactcatcactggacgaaaaaatctccgccagcgaagatgatgaggaggaggaggagaagtcacatcgcaagaagacagccaaaaaggtcaccccatcagcccgaaacgccaaggtatcgcccttgaagcgagtcgcagatagttcaccacccagccagaagcgcgttaagactgagcccaagtcaacacccagggagagagctacgcccaaggccagtcccaagccaaggagcacgccgaaggccagccccaagccacagacaccaacagcagcgcggctccgtactcccaatgccaagatcaatttcagcccgtctatttcgctgcgtggacgtcccggtggcaaaaccgtgatcaacgatgacctcactccacagccgcgttccaagaagacctatgagtttaacttcgagctcgacgttagcatggatgccaacgtaattgtgaatgtcaaacgcaaaaagaaagcggaccaggataaggcgacggcggttgattcacgtacaccctcatcccgcagcgcgttggcgtccagttcgaaggaggaggcctcacctgtgacccgagttaacctgcgcaaggtaaacggccatggcgactcctccacgcccggccgtagtccgcggacaccagccgtcactgtgcggaaataccagggataggagcctttgttttctgtatttttacatttgtaacctcattaataaaaacttgaaatattttcttaaaaaaaaaaaaaaaaaaaaaaaaaaaaaaaaaa

SEQ ID NO: 99 - protein, 599 aa, Drosophila melanogaster
MPRVAKPKAAAPAKKVVSAKKAKSKLYKMPEKVKEGTVFTDLAKGQWRIGPSIGVGGFGEIYAACKVGEKNYDAVVKCEPHGNGPLFVEMHFYLRNAKLEDIKQFMQKHGLKSLGMPYILANGSVEVNGEKHRFIVMPRYGSDLTKFLEQNGKRLPEGTVYRLAIQMLDVYQYMHSNGYVHADLKAANILLGLEKGGAAQAYLVDFGLASHFVTGDFKPDPKKMHNGTIEYTSRDAHLGVPTRRADLEILGYNLIEWLGAELPWVTQKLLAVPPKVQKAKEAFMDNIGESLKTLFPKGVPPPIGDFMKYVSKLTHNQEPDYDKCRSWFSSALKQLKIPNNGDLDFKMKPQTSSNNNLSPPGTSKAATARKAKKIDSPVLNSSLDEKISASEDDEEEEEKSHRKKTAKKVTPSARNAKVSPLKRVADSSPPSQKRVKTEPKSTPRERATPKASPKPRSTPKASPKPQTPTAARLRTPNAKINFSPSISLRGRPGGKTVINDDLTPQPRSKKTYEFNFELDVSMDANVIVNVKRKKKADQDKATAVDSRTPSSRSALASSSKEEASPVTRVNLRKVNGHGDSSTPGRSPRTPAVTVRKYQG

SEQ ID NO: 100 - DNA, 1293 bp, Drosophila melanogaster
ttagcgacaaaccagtaacagacgttgtcagaccgttgcggctgtttgtcgacgaacaatgaagtagccgctaaagccacacgttcaactttttgtgttaaatgaggcaattaaatgttactgtagggtcatggactcggtcgattattgccggctgtttaacaggcggctcgggaccgggcttctgcggtgggagatggtccattccaggaccaaatatccaggtcttagaagtgattgtaattggaaagtaattacacgtaattttttttgtcggcatacttcgccttgtctaggatgacggccttttgcggtcaacggaacgacacttccgaatggacttctacacgttggaggggaaaaactaagccaggacacggttgcgcctcgtgtacagcggcccgccgtcctactggttcaacgggaagtaggcgcgtcctcgtaagtagaaacggcttaagctcggctagcacttgaaacacctcgtcttccttgaccggtaaccgtcgaccgtcctgctcctgctcttccggctgtacgcgtggatacacagcgaccacctcttgtagaagtggtaccgactcgacatgtaatcgaagttcttgcttgcgcagatgtttctccagtgtcgcgggtccttgcctcagcaaaaagggaccggggagttagtgtacgtcttgatacctttcgccgccttgcgcgacgcagacaacttccagatagtcaccctgctggacctgtagctatcgcagtaactgttccaccggttcacgacactctgcgagcttatgttcgactttctcagcggcctttgcggtaagaagatgccgctagtcgggacgcttgacctgcggtagcggaagccggtggagaagtcgtaagactggtggtgcgacggcttgtaccgcgaccgggtttgccacgtcttcaaggtcgtgaaccagctcaagacagcgaagcagctactcttcatgaaagtctgctccacggatggtttaatcaatatgcatcagcaacggaatttacgaatagttaattcaacgagaacaggaaagaaaaattggcgaatatatacgttaagatttacgggaattttgtttagcagcggcattcagtgttaataaaacgatgatcgtaaattttttttttcaacaagatcactaaaacgacggtaattacaggtttttaggtacacttatagtaaacgtgttcactgagttagacgttcaaacaaatttaccttaagattttatgaagattgctagaaatgaagtaaataaaacgtcgtttatt

SEQ ID NO: 101 - protein, 287 aa, Drosophila melanogaster
SLFGHCLQQSGNADKQLLVTSSAISYLSQLITADKLSAEPWPEDATLYQPYEAEQILLPENASCLAVKAYLKMCNLPFLIRSCANAEHMSPGGRMTKLPFIRAGAFIFAEFEPIVNFVEQKELAIGSWQDEDEKADMRTYVSLVENIFTMAELYISFKNERVYKEVTAPRNGVVFPWPLNHMQNYGKRRNALRLLKVYQWDDLDIDSVIDKVAKCCETLEYKLKESPETPFFYGDQPCELDAIAFGHLFSILTTTLPNMALAQTVQKFQHLVEFCRFVDEKYFQTSK

SEQ ID NO: 102 - DNA, 14155 bp, Drosophila melanogaster
gagctccaccaaaggaatacgaaaagaacagtgaaaaaagtgaaatacagcagataagaaagtgaaatacatacataagtgaaccgggaaagaaagagatagaaccggaagtggtccgtggagaaaggactgtcgttatcgcagcgcgggtgcttgaactctcggcacaatggggcacggagtggcctccattggggctctgctagtaatcctggccatctcctattgccaggcggagctaacgccaccatatttcaatctggccacgggcaggaagatttatgccacagctacgtgtggcccggatacggatggaccagagctctactgcaaactagtgggagccaatacggaacacgatcatatcgactattcagttatccagggacaggtaactataatcgacatccagcaacgcccaaaaatcttttcagtatacacacatgatgagataatctttaactttacactgaaaaaaagttaatgtttaatttcaaaataaagctgaatcaggagagataacaaattacaatcgattatattggttatccaacttaattaagaatttcttcaaactattatttagttaaaaatcaaaactttatatttcaagtgtgcactgcatttagacgtcccccacatgtgttgaacattcgaattgggctctaaaaatactctggactgaatttggattccattttctttttctaacatgtgttttctgcgtttttgtaggtctgcgattactgcgatcccacggtgccggagaggaatcatccgccagagaacgcgatcgatggcaccgaggcctggtggcagagtcctccgttgtccaggggcatgaaattcaatgaagtcaatttgaccatcaacttcgaacaggtaagcagcagagaacataaaagataccaaaggtatccgcctaagaaacgcatagagacggggagacggtggatggatgcaactcgttttcgggttcgaccgatgggatcggatcgtaaaatttgaaaacaattttaatgggttttcatttcgtcgacgtcgacacagcaaaaactgaacgaaaaaaatgttgctgagctcgagtatttgttgttggcaaaggggaaggctttggagttgtgggttatcagtatgtcagcagtccctacatacaatatacacagagatatgtacgaacatacatacacacacttttgaatgggagttctcggtttacaggctgcttagaaaccgactcggagcattgactttttcgagcggttcattcggaatggttttttttagcgataaaggcattatgtttcttaaggcacaccagcatgcgacaaatatgaattgagagcagcctgataatgggcccgagtcgcaagaaactacagtcttatcatcagattgtttctcagtttgttctataaaaagttgtgcctcggactcgcctacgttcttatctcacttgcaacggaagcgagtaatccacgaggtcgggaatttaattttgagaataattgcgctaagatttcaacagctcagcatgatctcattcgtgttaattccttagttgcacttttcctaattcacaaaatgcaactgaatatgagacattggtttatatatagactgcgaaacaccaggaatgctggcaactcgaatgctaaatttgtgagatacatatttgcagaattatgtacatcgacgtttttttgcttcaaaatcatgaacttccacatgggtgaaactaatgaaaacacagaaaagtaaacaaatctctgaaaccaaacatgtgcgcctgtgtacaaagatattaacgcatggctgtatctttgtatatgtgtggaccttcgtatctctcagttcgctttcaattgaagccaaattaaaaagcaaacataacccaagacaatataaataaacgatgaaaaagtggccggttctactgcagaacatttggagttaatttccccacagtgatctcatgttgtcgtctcacatttgtctgtgaggcgatgtatgtacatatataatcgtaatgtgtacgctggactaataaatttcaatgaatttgcttgttcaaaatgaattttgtgtcttgggggagacttgaaaaaactaaagtgggtaaaattgttgaagactcttatattgaaattgaaatgagtaaatcttatctttaacatatttggggttactcaataacatttttaatttaacaatgtgtgtaatatgtaatatattttctgatctctacactgttcgctttttcaggaattccatgtggcctatttgttcattcgcatgggcaactcccctcgtccgggtctctggacgctggagaagtccacggattatggcaagacctggacgccttggcagcacttttccgatacccccgccgattgtgagacgtactttggcaaggacacctacaagccaattacccgcgacgacgacgtcatctgcaccactgaatactcaaagattgtgccgctggagaacggcgagattcccgtgatgctgctcaatgagcgacccagttccaccaactacttcaactcaacggtgctgcaggaatggactcgtgccactaacgtcaggattcgtctgcttcgcaccaagaatcttttgggacatttgatgtctgtggctcgacaagatcccacggtgacgcgtcgctacttctactcgatcaaggacatctcgatcggaggaaggtgcatgtgcaatggacacgccgacacctgtgacgtcaaggacccgaagagcccagtccgcatcctcgcatgccgttgccagcatcacacgtgcggcatccagtgcaacgagtgctgtcctggattcgagcagaaaaagtggcgccaaaacaccaatgcccgaccattcaactgcgaacgtaagtattgtgtagtcttttgaacggacatctctcttgagcggacagagacccggatctttatttccgaattttattactagcctgcaactgtcatggtcacagcaacgagtgcaagtacgatgaggaagtgaaccgcaagggactgtccctggacattcacggacactacgatggtggtggtgtttgccagaactgtcagcacaataccgtgggaattaactgcaacaagtgcaagccgaaatactatagacccaagggcaagcactggaacgagaccgatgtctgcagccgtaagagccagttataatttaaaggaatccgtaataccatcgttctcccatccatttagcctgccaatgcgactacttcttctccaccggacactgcgaggaggagaccggaaactgtgagtgccgtgctgccttccaaccgccaagttgcgactcctgcgcgtatggatactatggttaccccaattgccgggagtgcgaatgtaatctgaatggaaccaatggctaccactgcgaggctgaaagcggacagcagtgcccgtgcaagatcaatttcgcgggggcctactgtaagcagtgcgccgaaggatactacggattccccgagtgcaaggcatgcgagtgcaacaaaatcggctcgattaccaacgactgcaacgtgaccactggagagtgcaagtgcttgaccaatttcggaggcgacaactgcgagcgctgcaagcacggatacttcaactaccctacttgctcatgtaagaaattaataatattttaaagttgaaaaaccaactgatgctgattatgattctccttggcagactgcgactgcgacaaccagggcacggagtcggaaatctgcaacaagcagtctggccagtgcatctgtcgtgaaggttttggaggcccaagatgcgatcagtgcttgccaggattttacaactatccggactgcaagccatgcaactgctccagcacgggtagttcggcgatcacctgcgacaacacgggcaaatgtaactgcctcaacaactttgccgggaaacagtgcacgctctgtactgccggatactacagctatccggattgtctacgtatgtaccctcagccatcagatttcatttcaattttaataacctctaatttatcttgatttgcagcttgtcactgtgactctcacggatctcagggagtgtcctgtaattcagacggacagtgcttgtgtcagcccaactttgacggacgtcagtgcgattcctgtaaggagggcttctacaacttccccagctgcgaggactgcaactgtgatcctgcaggagtgatcgataagttcgccggatgcggatcggtgcccgtgggtgagctctgcaagtgcaaggagcgagtgacgggcaggatctgcaatgagtgcaagccattgtactggaacctgaacatcagcaatactgagggatgtgagatttgcgattgttggacagatggtactatttccgcactggacacctgtacctcgaagtccggacagtgtccctgcaagccgcatactcaaggcaggcgctgccaggagtgtcgggatggtaccttcgatctggacagtgcctcgctgtttggctgcaaggactgcagttgcgatgtgggcggctcgtggcaaagtgtttgcgacaagatcagcggacagtgtaagtgccacccgaggattacgggtctggcatgtacccagccactgaccacccacttcttcccaacgctgcatcagttccagtacgaatacgaggatggatcactaccatcgggcactcaggtgcgctacgactacgatgaggcggcattccccggatttagcagcaagggctatgtggtgttcaacgccattcagaacgatgtacggaacgaggtcaatgtctttaagtcatctctgtatcgtattgtcctgcgatatgtgaatccaaatgccgagaatgtcactgccaccatttcggttacttcagacaatcctctggaggttgatcagcagtaagtatttgtagaactttgctagagaaagatcttaagtattccggttttacagcgttaaggttctactgcaacccacatcggaacctcagttcgtaactgttgcgggtcccttgggagtgaaaccctcagccattgttttggatccgggtcgttatgtatttaccaccaaggccaacaagaatgtgatgcttgattactttgttctcctacccgccgcttactacgaagccggaattctaacgcgccacatctcaaatccctgtgaactgggcaacatggagctgtgccgtcactacaagtacgcctctgtggaagtgttctcaccagcggcaactccattcgtcatcggtgaaaactccaagccgaccaatcccgtcgagacgtacactgatccggagcatctgcagattgtgagccatgtcggtgatattcccgtactgagcggatcccaaaatgagctgcactacatcgtggatgtgccacgaagtggccggtatatcttcgtgattgactacatcagcgataggaacttccccgacagttactatatcaacttaaaactaaaggataatccagattcggaaacatccgtgctgttgtatccatgcttatactcgactatttgccgaacatcagttaacgaggatggtatggagaagtcattctatattaacaaagaggatttgcagccagtcatcatctccgtgagttcgaaatattaatcaagctattaacagcaaaataatcactttcctattttgttcaggctgacatcgaagatggttctcgtttcccgattatctcggtgacagcaattcccgtcgaccaatggtccattgactacatcaacccaagtcccgtctgtgtgatccatgatcagcaatgcgccactccgaaattccgttccgttcccgattccaagaagatcgagttcgaaactgatcatgaggaccgtattgccaccaacaaacctccatatgcctcactcgatgaacgagttaagctggtccacttagacagtcaaaatgaagcaaccatcgtgattgagtgagtttgtcacttctttatattatattatatattatttatttatttatattattttatatatacagatcaaaggttgatgctacaaaaccgaatctatttgtgatcctggtgaagtactaccaaccgagccaccccaaataccaggtgtactacacgctgacagcgggcaagaaccagtacgatggcaagttcgacattcagcactgtccatcgagttccggatgccgcggtgtgatacgccccgccggagagggttcgttcgagattgacgacgagttcaagttcacgattacggtaagactattataaaatacaatcttaagctactttaaaaccgcaaattggttttagaccgatcgatcccagagcgtttggctggactacctggtggtggttcccttgaagcagtacaatgatgacctactggtggaagagaccttcgaccagaccaaggagttcattcagaactgcggccatgaccacttccacataacccacaatgccagtgatttctgcaagaaatccgttttctctctaacagccgattacaatagtggagcattgccttgcaattgcgactacgccggatccacgagcttcgagtgtcatccgttcggaggtcagtgccagtgcaagccgaatgtgattgagcgcacgtgcggacgctgtcgcagtagatactacggattccccgactgcaagccatgcaagtgtcccaatagcgccatgtgtgagcccaccactggtgagtgcatgtgtccgcccaatgtcattggggatttgtgcgagaagtgcgcccccaacacctatggattccatcaggtaagatttttgactagccttcaacagcaggtgctaaaaatcgcatttcattgtccaccaggtcattggctgcgaggagtgtgcatgcaatcctatgggcattgccaatggaaactcccagtgcgatctgttcaatggaacctgcgagtgtcggcaaaatatcgagggcagggcctgtgatgtttgctccaatggatactttaacttcccgcactgcgagcagtgcagttgccacaagcccggcaccgaactggaggtgtgtgacaagatcgatggcgcatgcttctgcaagaagaatgtggttggaagggactgtgaccagtgtgtcgatggaacatacaatctgcaggagtcgaatccggatggttgcaccacttgcttctgctttggcaagacttcgcgatgcgacagtgcctatctcagagtttacaatgtgagcctgcttaagcatgtgtccatcactactccggaattccacgaggagagcatcaagtttgatatgtggcccgtacccgcggatgaaattcttctgaatgagaccacgctgaaggcagactttaccttacgggaggtcaacgatgaacgacctgcgtactttggggttctggactatctgcttaaccagaataatcacatctctgcttatggcggagacctggcttatactttacatttcacttctggcttcgacggcaaatacattgtggctccggatgtaattttgttcagtgaacacaatgccctggtccatacaagctatgagcagcccagccgaaatgaaccattcaccaaccgcgtcaatatagtggaatcgaatttccagacgatttccggaaaaccagtttcacgagctgatttcatgatggttctgcgggatctaaaagtaatctttatcagagccaactattgggaacagaccttggtgacccacctgtccgatgtgtatctaactctagccgatgaggatgcagatggcactggcgaataccagttcctggccgtggagcgttgctcctgcccacctggttactccggacactcgtgcgaggactgtgccccgggctactaccgagatcccagcggaccttatggtggttactgcattccctgcgagtgcaatggacattcggagacctgtgattgcgctaccggaatctgttcaaagtgccagcatggaacagagggtgatcactgtgagcgctgtgtgtccggttactatggaaacgccacgaatggaacacccggagattgtatgatctgcgcttgcccactgccatttgactcgaacaactttgccaccagttgcgaaatctccgagagcggagaccaaatccattgtgagtgcaagccaggatatacaggaccacgttgcgagtcttgcgccaatggtttctatggagagccagagagcataggacaggtgtgcaagccgtgcgagtgttccggtaacatcaatccagaggatcagggatcttgcgacactaggaccggtgaatgtcttcgctgcttgaataacaccttcggtgctgcctgtaatctgtgtgcacctggattctatggcgatgctatcaagctaaagaactgccagagctgcgactgcgatgatctgggcacccagacgtgtgatccctttgtgggcgtctgcacctgtcacgagaacgtcattggcgaccgttgcgatcgctgtaagccggatcactatggatttgagtcaggtgttgggtgccgagcctgcgactgcggtgctgcctccaattcaacgcagtgtgacccacacacaggtcactgtgcctgcaagtcgggagtgacaggacgacagtgcgatcgatgcgccgttgaccattggaaatacgaaaaggacggttgcactccgtgcaattgcaatcagggatactcacgaggattcggttgcaatcccaacaccggcaagtgccaatgtctgccaggagtaattggagataggtaactaacacttgtgatctttggtttctaaatgttgagtgtactaaaactactttcgtcattccagatgcgacgcttgtccgaatcgatgggttctgatcaaggatgaaggctgtcaggagtgcaacaactgccaccacgcccttttggatgtcactgatcgaatgcgctatcagatcgatagtgtcctggaggactttaacagtgtaaccctggccttcttcaccagtcaaaaattgaactattacgaccagctggccgatgaactggagcccaaggttaagctattggatcccaacagcgtggacctgagtccatccaaaaaggccaacagcgaattggaatccgatgccaagtcctatgccaaacaggtcaaccagaccctggccaacgccttcgatatccgtgagcgatcgagcaccactttgggtaacataacagttgcttatgatgaggcggtcaagagtgccgaccaggccaaagaggccatcgcttcggtggaagctctttccaagaatctcgaggcggcagcgagcacaaagattgatgctgctctggagcaagcacagcacattttgggacaaatcaacggaaccagtatcgaacttacacccaatgaacaagtcctggaaaaggcgaggaaactctatgaagaagtgaacactctagttctgcccatcaaggcgcaaaacaagagcctcaatgccctcaagaatgatattggagaattcagcgaccatctggaagatcttttcaactggagcgaagcttcacaagccaagtccgctgacgttgagcgccgcaatgtggccaaccagaaggcctttgacaactctaaattcgacaccgtttcggagcaaaagctacaggcagagaagaacatcaaagatgctggcaatttcctcatcaatggcgatctgaccctgaatcaaattaatcagaagttggataacttgagagatgctctaaacgagctcaattcgttcaataaaaatgtggacgaagaattacccgtgagggaggaccagcataaggaggcggatgcccttaccgatcaagccgaacagaaggcggccgaattggccattaaggcccaagatctggctgcccaatacacggatatgactgccagtgcggagccggccatcaaggccgcaactgcctactcgggaatcgttgaggccgttgaagctgcccagaaactcagtcaggatgcaatctctgcggccggaaatgccactgataagacagatggcattgaagagagagctcatctcgctgacactggatctactgatcttctccagagagcacgccagtctctgcagaaggtacaagacgacctagagccccgtctgaacgcctcggccggcaaggtgcagaaaatctcagccgtgaacaatgccaccgaacaccagctgaaggatattaacaagctgattgaccaactgccagctgagtcgcagagggatatgtggaagaattcaaatgccaatgccagtgatgctctggagatactgaagaacgtcctagagatactcgaacctgtgagtgtccaaacgccaaaggaactcgagaaggcacatggcatcaatagagatttggatctgaccaataaggacgtttctcaagctaacaaacaattggatgacgtagaaggatccgtttcgaagctaaacgaattggcagaggatatcgaggaacagcagcaccgtgtgggcagtcagagccggcagttgggccaggaaatcgagaacttgaaggcccaagtggaggctgctcgccagttggccaacagcatcaaggtgggcgtcaatttcaagccaagcacgatcctggaactgaagacaccggaaaagaccaagttgctagccactcgcaccaatctatcgacctatttccgcaccaccgagccatccggtttccttttatatctgggcaatgacaacaagaccgcccagaagaacaacgactttgtggccgttgagattgtgaatggctatccgattcttaccatagatttgggcaatgggccggaacgcatcaccagcgataagtacgtggcagatggtcgctggtatcaggctgttgtggatcgcatgggtccgaatgccaagctaacaattagggaagaactacccaacggtgacgtggttgagcacagcaagtctggctatcttgaaggatcccagaatatccttcatgtggataagaacagtcgcctatttgttggtggctatccgggtatttcggacttcaatgctccgccagacttgaccactaactccttctccggcgacattgaggatctaaagattggcgatgagagcgtaggattgtggaactttgtatatggcgatgataacgaccagggcgccagggagcgggatgtgctgctcgagaagaagaagccggtaactggtctgcggttcaagggtaatggatacgtccaactgaacgccacatcgaacttgaagagccgctccagcatccagttcagcttcaaggcagacaaggatacttccaatggactgctgttcttctacggcagggataagcactacatgagcattgagatgattgacggagctatcttcttcaacattagtttgggtgaaggtggaggcgttcaatccggcagccaggatcgctacaatgacaaccaatggcacaaggtccaggcggaaagggaaaaccgaaacggccttctcaaggtcgacgatatagtaatatcacggaccaatgctccattggaagcggacttggagttgcccaagctgaggagattatacttcggtggtcatccgagacgtctgaatacctcgataagtttgcaacccaactttgatggctgcatcgataatgttgtgatcaaccagggagtggtcgaccttacagaatacgtaactggcggcggagttgaggaaggatgctcggcgaagttctccacggtggtgtcatatgcgccgcatgagtacggattcctgaggatgaacaacgtttcctcagataacaatctgcatgtggttctgcacttcaagaccacgcaaccgaatggcgtactcttctatgccgccaatcatgaccagagttccaccattggcctcagcctacaagatggtttgctcaagctcaacagcatgggcagtcagttggtaatcgacgatcgtattctgaacgatggcgaggatcatgtggttacagttcagcacacccaaggtgaacttcgtcttacggtcgatgatgtagataacaagaggtaactttaaagaagacttcgatctcttttgtggttcctatgctaatctacattttacattctcatagacttggttctccacaaccattaatcctggagggtggtgacatcttctttgctggcttgccggacaactatcgaacaccgaggaacgcgttggcctctttggcctactttgtcggttgcatcagcgatgtaaccgtgaacgaggagatcattaactttgccaacagtgctgagaagaagaatggcaacatcaacggttgcccaccacatgtactaggtgagttgacaggatacaacatccgattgaaagccgatttataaaaatctctatttgcttacagcctacgaaccaagtttggtgcccagttactacccaagtggagacaacgaggtggagtctccgtggtcaaacgccgatactctgcccccacttaagccagatattgaaagcacactaccgcccacaacgcccactacgaccaccacgacaactaccacaacaacatcgactactacaacttcaacaacgacaactactacgacaccatccccgatagtcattgatgaggagaaggagattgaggcgaaaacaccgcaaaagatcctaacaacgcggccaccagccaagctgaaccttcccagcgatgagcgctgcaagttgccggagcaacccaatttcgatgttgatttcacagaggcgggttaccgattctatggactgcgggagcagcgcctgcagattaactcactgccggtgaaggtacgccgtcaccatgacattggcatctcattccgtactgagcgaccaaacggtctgctcatttatgccggaagtaagcagcgcgatgacttcatagccgtgtatcttctggacggtcgggtgacatacgagatacgggtgggtgcacagttgcaggccaagatcactaccgaggcggagctgaacgacggcacctggcacaccgtggaggtggtgcggacccaacgcaaggtatccctgctcatcgacaagttggagcagccgggttccgtggatctgaatgcggaaagatccgctccggtattggctgtcgagttgcccatctatctgggcggagttaacaagttcctggagtcggaggttaagaatctcaccgatttcaagactgaagtaccgtactttaacggctgcctcaagaacatcaagttcgacgctatggatctggaaacaccaccggaggagtttggtgtggttccgtgctctgagcaggtggaacgcggtttgttcttcaataaccagaaggcgtttgtaaagatctttgatcacttcgatgtgggcactgagatgaaaatcagcttcgatttccgaccgagggatcccaacggattgctcttctctgtgcacggcaagaactcttatgccatactcgagctagtagacaataccttgtactttaccgtgaagaccgatctgaagaacattgtgtccaccaactataagctgcccaacaacgaaagcttctgcgatggcaagacgcgcaatgtccaggccatcaaatccaagtttgtgatcaacatagccgtggatttcattagctccaaccccggcgtgggcaacgaaggatcagtgatcacaaggaccaatcgtccgctgttcttgggcggacatgtggccttccagagggccccgggcatcaagaccaagaagtcctttaagggctgcatcagcaaggtggaggttaaccaaaggatgatcaacatcacgccgaacatggtcgttggcgatatttggcagggctattgtcccctcaactaataaagaacttcggaacgacttaaggacctatgatttatttggacaacgactacgaaaaactgccaggaagaatcttcttttgccgacaactgctaatcaaaggacaacgaacgatcaaatttcaaacgaacaaaatcgacgggtcataaaaaagtcataaggtcttcaaagtaatagatccttagcaaagatgccagtcgtatatattcctagtactataagccaaactgcgtgccaattctattaaagccatttacatttatatatcctttttaaaactccttaagagaatcttgcatttttgtaattccaataaaccaataaaataaacattttaatgaaac

SEQ ID NO: 103 - protein, 3712 aa, Drosophila melanogaster
MGHGVASIGALLVILAISYCQAELTPPYFNLATGRKIYATATCGPDTDGPELYCKLVGANTEHDHIDYSVIQGQVCDYCDPTVPERNHPPENAIDGTEAWWQSPPLSRGMKFNEVNLTINFEQEFHVAYLFIRMGNSPRPGLWTLEKSTDYGKTWTPWQHFSDTPADCETYFGKDTYKPITRDDDVICTTEYSKIVPLENGEIPVMLLNERPSSTNYFNSTVLQEWTRATNVRIRLLRTKNLLGHLMSVARQDPTVTRRYFYSIKDISIGGRCMCNGHADTCDVKDPKSPVRILACRCQHHTCGIQCNECCPGFEQKKWRQNTNARPFNCEPCNCHGHSNECKYDEEVNRKGLSLDIHGHYDGGGVCQNCQHNTVGINCNKCKPKYYRPKGKHWNETDVCSPCQCDYFFSTGHCEEETGNCECRAAFQPPSCDSCAYGYYGYPNCRECECNLNGTNGYHCEAESGQQCPCKINFAGAYCKQCAEGYYGFPECKACECNKIGSITNDCNVTTGECKCLTNFGGDNCERCKHGYFNYPTCSYCDCDNQGTESEICNKQSGQCICREGFGGPRCDQCLPGFYNYPDCKPCNCSSTGSSAITCDNTGKCNCLNNFAGKQCTLCTAGYYSYPDCLPCHCDSHGSQGVSCNSDGQCLCQPNFDGRQCDSCKEGFYNFPSCEDCNCDPAGVIDKFAGCGSVPVGELCKCKERVTGRICNECKPLYWNLNISNTEGCEICDCWTDGTISALDTCTSKSGQCPCKPHTQGRRCQECRDGTFDLDSASLFGCKDCSCDVGGSWQSVCDKISGQCKCHPRITGLACTQPLTTHFFPTLHQFQYEYEDGSLPSGTQVRYDYDEAAFPGFSSKGYVVFNAIQNDVRNEVNVFKSSLYRIVLRYVNPNAENVTATISVTSDNPLEVDQHVKVLLQPTSEPQFVTVAGPLGVKPSAIVLDPGRYVFTTKANKNVMLDYFVLLPAAYYEAGILTRHISNPCELGNMELCRHYKYASVEVFSPAATPFVIGENSKPTNPVETYTDPEHLQIVSHVGDIPVLSGSQNELHYIVDVPRSGRYIFVIDYISDRNFPDSYYINLKLKDNPDSETSVLLYPCLYSTICRTSVNEDGMEKSFYINKEDLQPVIISADIEDGSRFPIISVTAIPVDQWSIDYINPSPVCVIHDQQCATPKFRSVPDSKKIEFETDHEDRIATNKPPYASLDERVKLVHLDSQNEATIVIESKVDATKPNLFVILVKYYQPSHPKYQVYYTLTAGKNQYDGKFDIQHCPSSSGCRGVIRPAGEGSFEIDDEFKFTITTDRSQSVWLDYLVVVPLKQYNDDLLVEETFDQTKEFIQNCGHDHFHITHNASDFCKKSVFSLTADYNSGALPCNCDYAGSTSFECHPFGGQCQCKPNVIERTCGRCRSRYYGFPDCKPCKCPNSAMCEPTTGECMCPPNVIGDLCEKCAPNTYGFHQVIGCEECACNPMGIANGNSQCDLFNGTCECRQNIEGRACDVCSNGYFNFPHCEQCSCHKPGTELEVCDKIDGACFCKKNVVGRDCDQCVDGTYNLQESNPDGCTTCFCFGKTSRCDSAYLRVYNVSLLKHVSITTPEFHEESIKFDMWPVPADEILLNETTLKADFTLREVNDERPAYFGVLDYLLNQNNHISAYGGDLAYTLHFTSGFDGKYIVAPDVILFSEHNALVHTSYEQPSRNEPFTNRVNIVESNFQTISGKPVSRADFMMVLRDLKVIFIRANYWEQTLVTHLSDVYLTLADEDADGTGEYQFLAVERCSCPPGYSGHSCEDCAPGYYRDPSGPYGGYCIPCECNGHSETCDCATGICSKCQHGTEGDHCERCVSGYYGNATNGTPGDCMICACPLPFDSNNFATSCEISESGDQIHCECKPGYTGPRCESCANGFYGEPESIGQVCKPCECSGNINPEDQGSCDTRTGECLRCLNNTFGAACNLCAPGFYGDAIKLKNCQSCDCDDLGTQTCDPFVGVCTCHENVIGDRCDRCKPDHYGFESGVGCRACDCGAASNSTQCDPHTGHCACKSGVTGRQCDRCAVDHWKYEKDGCTPCNCNQGYSRGFGCNPNTGKCQCLPGVIGDRCDACPNRWVLIKDEGCQECNNCHHALLDVTDRMRYQIDSVLEDFNSVTLAFFTSQKLNYYDQLADELEPKVKLLDPNSVDLSPSKKANSELESDAKSYAKQVNQTLANAFDIRERSSTTLGNITVAYDEAVKSADQAKEAIASVEALSKNLEAAASTKIDAALEQAQHILGQINGTSIELTPNEQVLEKARKLYEEVNTLVLPIKAQNKSLNALKNDIGEFSDHLEDLFNWSEASQAKSADVERRNVANQKAFDNSKFDTVSEQKLQAEKNIKDAGNFLINGDLTLNQINQKLDNLRDALNELNSFNKNVDEELPVREDQHKEADALTDQAEQKAAELAIKAQDLAAQYTDMTASAEPAIKAATAYSGIVEAVEAAQKLSQDAISAAGNATDKTDGIEERAHLADTGSTDLLQRARQSLQKVQDDLEPRLNASAGKVQKISAVNNATEHQLKDINKLIDQLPAESQRDMWKNSNANASDALEILKNVLEILEPVSVQTPKELEKAHGINRDLDLTNKDVSQANKQLDDVEGSVSKLNELAEDIEEQQHRVGSQSRQLGQEIENLKAQVEAARQLANSIKVGVNFKPSTILELKTPEKTKLLATRTNLSTYFRTTEPSGFLLYLGNDNKTAQKNNDFVAVEIVNGYPILTIDLGNGPERITSDKYVADGRWYQAVVDRMGPNAKLTIREELPNGDVVEHSKSGYLEGSQNILHVDKNSRLFVGGYPGISDFNAPPDLTTNSFSGDIEDLKIGDESVGLWNFVYGDDNDQGARERDVLLEKKKPVTGLRFKGNGYVQLNATSNLKSRSSIQFSFKADKDTSNGLLFFYGRDKHYMSIEMIDGAIFFNISLGEGGGVQSGSQDRYNDNQWHKVQAERENRNGLLKVDDIVISRTNAPLEADLELPKLRRLYFGGHPRRLNTSISLQPNFDGCIDNVVINQGVVDLTEYVTGGGVEEGCSAKFSTVVSYAPHEYGFLRMNNVSSDNNLHVVLHFKTTQPNGVLFYAANHDQSSTIGLSLQDGLLKLNSMGSQLVIDDRILNDGEDHVVTVQHTQGELRLTVDDVDNKRLGSPQPLILEGGDIFFAGLPDNYRTPRNALASLAYFVGCISDVTVNEEIINFANSAEKKNGNINGCPPHVLAYEPSLVPSYYPSGDNEVESPWSNADTLPPLKPDIESTLPPTTPTTTTTTTTTTTSTTTTSTTTTTTTPSPIVIDEEKEIEAKTPQKILTTRPPAKLNLPSDERCKLPEQPNFDVDFTEAGYRFYGLREQRLQINSLPVKVRRHHDIGISFRTERPNGLLIYAGSKQRDDFIAVYLLDGRVTYEIRVGAQLQAKITTEAELNDGTWHTVEVVRTQRKVSLLIDKLEQPGSVDLNAERSAPVLAVELPIYLGGVNKFLESEVKNLTDFKTEVPYFNGCLKNIKFDAMDLETPPEEFGVVPCSEQVERGLFFNNQKAFVKIFDHFDVGTEMKISFDFRPRDPNGLLFSVHGKNSYAILELVDNTLYFTVKTDLKNIVSTNYKLPNNESFCDGKTRNVQAIKSKFVINIAVDFISSNPGVGNEGSVITRTNRPLFLGGHVAFQRAPGIKTKKSFKGCISKVEVNQRMINITPNMVVGDIWQGYCPLN

SEQ ID NO: 104 - DNA, 1550 bp, Drosophila melanogaster
aattccgggacgtgtgtttcgccactcctacactcaaaaatatattgcaatcacattgaaagaccgatcgcagagtcctcagtactcggactacccaaccgactgtggaaaagtgattaagtgcgagtttttgggaagctgaagtaaaacagttgatgcaacatgccgcccaacgcccaagccggtgcccagtccatctcagactcactgatcgcagcagctagtgccgccgccgacgcaggtcagagccccaccaagctgcaggaggactccaccggagtgctcttcgagtgcgatgtggaaaccaccgacggtggtcttgtcaaggacatcaccgtgatgaagaaggccgagaagcgcctgctgaagctcgtctggcgcaacatcatcgccttcggttacctccatctggctgccctctacggagcctacctcatggtcacctctgccaagtggcagacgtgcatcttagcttattttctatacgtcatttctggcctaggcattaccgccggtgcccatcgtctgtgggcgcatcgctcctacaaggccaagtggcccctgcgagtgattctggtcatcttcaacacgattgccttccaggatgccgcctaccattgggctcgcgaccatcgcgtccaccacaaatactcggagactgacgccgatccccacaacgccacgcgtggtttcttcttctcgcacgtcggctggctgctgtgcaagaagcacccggaggtgaaagccaagggcaagggggtcgatctatccgatctgcgcgccgatcctatcctcatgttccagaagaaatactacatgattttgatgccgattgcttgcttcatcatcccgaccgtggtgcccatgtacgcctggggtgaatccttcatgaacgcctggtttgtggccaccatgttccgctggtgtttcattctgaacgtaacctggctggtgaacagtgctgcccacaagttcggtggccgtccctacgacaaatttatcaatccttcggagaacatctccgtggctatcttggcctttggagagggatggcataactaccatcacgtcttcccctgggactacaagacggccgagtttggcaaatactcgctaaacttcactaccgccttcatcgatttcttcgccaagatcggctgggcctacgacctcaagacggtgtccacggatatcataaagaagcgtgtgaagcgtaccggtgacggcactcacgccacgtggggatggggcgatgtggaccagcccaaggaggagattgaggatgctgtcattactcacaaaaaaagcgaataggcaggttgagcgtagggccaatcatgggagggtttagcagaaaatcaatcaaattcaagtaaagcaaagaaacataaatttccattttgcaaatgtccgcggaacatatttcctaacagagcagaagcccatttaattaattctaagataaagcgttgatgataactgtttgttgtatctcgaaaaactttataccgtctgtgttaaaccagctccggaaatgttttccggaaaaa

SEQ ID NO: 105 - protein, 383 aa, Drosophila melanogaster
MPPNAQAGAQSISDSLIAAASAAADAGQSPTKLQEDSTGVLFECDVETTDGGLVKDITVMKKAEKRLLKLVWRNIIAFGYLHLAALYGAYLMVTSAKWQTCILAYFLYVISGLGITAGAHRLWAHRSYKAKWPLRVILVIFNTIAFQDAAYHWARDHRVHHKYSETDADPHNATRGFFFSHVGWLLCKKHPEVKAKGKGVDLSDLRADPILMFQKKYYMILMPIACFIIPTVVPMYAWGESFMNAWFVATMFRWCFILNVTWLVNSAAHKFGGRPYDKFINPSENISVAILAFGEGWHNYHHVFPWDYKTAEFGKYSLNFTTAFIDFFAKIGWAYDLKTVSTDIIKKRVKRTGDGTHATWGWGDVDQPKEEIEDAVITHKKSE

SEQ ID NO: 106 - DNA, 807 bp, Drosophila melanogaster
atgaatatcgattcgctgaaaaacgagtgggaagaactcaataaggagtttgccgaactggaggtaagctctatatatattcatttatatatacaaacatacatctgtagaatcgagaagtaatgcccacagactatatagatatcaataccaaaattcgaagacatgaaagaggcacgcgcacaaacacccacacgtgtgtctgtgtcgctttcaccttggacaaaaacagctgcttgttcttaaaaatacccttgccaaagagagccaaatgaaattcactaagaactcaataatttccattaaatttgatactattatcagcaaaaagtgttaagcaccattataaatggcaccaaattttgtatgcataattgtatacactttttttttctttccaatcagaagattttcaaaattaaaactttaacaaacagctgttcataaataagtttacagctatgatatcagtaacgtatgaaattccgatcgcctgtttttaaagattattgaactcattgttggtatatggctgtttattacgataagtagagataataccattgaactttgaactttgagagctggcaaaaaatgtgctcgatgctcggcaagggtattcaaaattcttctcaatggtcttgcttattcctttccaaccctttttttttattcccaccgatcacagagctgcaacaggcggtacatcgagctgctggaacagctgcacagccatcaacaaatctgcttcaatgagatcaagcatcagcggtaccgcatgaaccagataacgacgtctctgcgaca

SEQ ID NO: 107 - protein, 60 aa, Drosophila melanogaster
MNIDSLKNEWEELNKEFAELESCNRRYIELLEQLHSHQQICFNEIKHQRYRMNQITTSLR

SEQ ID NO: 108 - DNA, 831 bp, Drosophila melanogaster
tactatggctggtattgcttcttcatggtcttgcaccactaatcgtgcccgttgtagtagcggtgccttgaccctgtcgcgtttagcttgctcctcgacatgctgccggacttctattgcgaggtgtggctgagctgacgcctcgcgcaccaccaacttttcctctagctgctcgacgtacccgcccacgtttcccggtgggtcctcaactggtgggcgaactgcctcttacctgccttactctattcatagccacggttctataaggagttagcggtgaggtgtctcagacacttagtccgccacctcctcgacgaggtgtatgaatcacactgcgtgcacctgttacaccacaaccggatggtgggcttacgccaacggtggcgttgcggccaccggtgttggtttggcgggacaaggctcctaaggttgcagtcgtcccgatgtttgacctcggtcgcgttacctttccttcctcaccgtctcgacttccttgacatgttttgtgacctcgttatacgggagttcgtcgtctaatgtgtcgacccttaacggctagacctacgccgccgcgacctcctcgatgtgttgtcgcgtgtccaacacgggtgttaacgggtccagttggacagatgcacgacgcaccacggtggtcttgacgtcctcaagacgtggcgagtgctgtaggttgacttgtgcgtgtcgctagggctcgaggacgacgggcacctcgtcaagctgcctgaccagggaccgatgtgttagctgacctgtgacgcaatggtccacgtacaggcgacggccccgcaagagtggcggttcccgatgtag

SEQ ID NO: 109 - protein, 277 aa, Drosophila melanogaster
MIPTITKKYQNVVISTGNIIATELGQRKSNEELYDGLKITLHTDSTAERVVVEKEIDELHGRVQRATQELTTRLTENGRNEISIGAKIFLNRHSTESVNQAVEELLHILSVTHVDNVVLAYHPNAVATATPVATTKPPCSEDSNVSRATNWSQRNGKEGVAELKELYKTLEQYALKQQITQLGIADLDAAALEELHNSAQVVPTIAQVNLSTCCVVPPELQEFCTAHDIQLNTHSDPELLLPVEQFDGLVPGYTIDWTLRYQVHVRCRGVLTAKGYI

SEQ ID NO: 110 - DNA, 387 bp, Drosophila melanogaster
atggagaagtacattggtaaattcctggagcgggggtacgacagcattgaacgctgcaagcttattatcgtaagcgatctgatcatgctgggagtggataatcccgctcataggaagctcctgctcgagggagtccggttcttggtcaacgcacccgagcagttcatctgcaaggagccgtgtgagctgcatgaggagattgaactgaaattagacccggatgttgagttgtttgcttcgctaaagtgcctggaaaatgttgatttcctagaaacacctgttccatattcgctaacatctccacaaaagacgctcacaactcgggactcttgcaaatggaatgtcaaaggtgtggatcagttaccttccgataacatatttaactaa

SEQ ID NO: 111 - protein, 128 aa, Drosophila melanogaster
MEKYIGKFLERGYDSIERCKLIIVSDLIMLGVDNPAHRKLLLEGVRFLVNAPEQFICKEPCELHEEIELKLDPDVELFASLKCLENVDFLETPVPYSLTSPQKTLTTRDSCKWNVKGVDQLPSDNIFN

SEQ ID NO: 112 - DNA, 4526 bp, Drosophila melanogaster
gaattccaaaagccgcaaaagactgcctctgcaagtaaaagattcaagtcgctgagtagcaatagcaaatgctctaaaaaatcaagaataaaataaaataaaagtgacgggcgtgtaacaattatgtgatatctacaacaaatgctcgaactgctgacgtcacgcacagaatcgtagaatatatagagaataaagaagagaaacgaaaactgagcgtagtaaagttaaaagttcccacaccaccgacgtactcacactcgcacacacacagactgagtcaaaacgagtaagaagcagcagcacattatacgtggaatacaaaaagtaaccgacagaaaaggcaaaacgcccgcagaaaaatgaaaaatttgcaaatatgaaacgtgtgtgatattcaaaaagagcaagaagaagcaggcggcggtggaaaaaaaagcagagcaatttgttgtggttgcgtgtgatatatagaaagcaagtaaaaccaacaaaaattggatttttagatgtgaagaatccttaggtgctaatttagttgataagcgcaaactgcaaagagaggaagacagagagcgattaacagaaacaggcagtacaataagtcaatcgactcgagagctggaaattccgactgggtggcaacttttcgaaggcagtgcttaaaagtatgctacaatatagtgccagcgattgccgactgaggcgaacctaacagaatcggcatatttatagaatatatacagaagatatatacacggagcaaagagagagagagagagagcggaggagagagagggagagagtaagagtcaggcggagaatcgccgaggaatcacgatagaaccggcagcgaaatgtccaagttctttgtgaatgttgcccccatcaacaacagcaacagcagcagtagccacacaaccaccagcagcaacacccagcgccaccagcagcaccaacaacactatggcgggagcgggacaaccggccacacgatggtggcccgcagactcaactacgatctgcacggcggcaccaccagcatcaacaacaacaacaacattgtgatcaaaaacgagtccgtcgacttggactacgatcacgtcctgagcagcagcgacagcaacagcaacggcggcgtggcagcccacctgcgggatcatgtctacatcagtctggacaaggggcacaacacgggggcagtggcaacagcagcggcggcggcaacggcgggccaaacgcagcagcaactgcagcagcagcaccaccaccaaaatcagcagcaacgcaaggcgaccggcaaatccaacgatatcacaaattattacaaggtcaaacgtcggccacacgccgtcagcgatgagattcacccgaagaagcaggccaagcagagcgcccaccaccagacggtgtatcagaagcatacggctagcagtgcgccccagcagctccggcacagccaccaccagctgcgccacgacgcggatgccgaactggacgaggatgtggtggagcgggtggccaagccggcatcgcatcaccccttttcgctgtcgacgccccagcaacagttggctgcgtcggtggccagcagttcctcgagcggagatcgcaatcgggcggacacctcgctgggaatactgaccaaaaagtttgtggacctgctgcaggagtcaccggatggcgtggtggatctgaacgaggcctccaatcgattgcacgttcagaagcggcgcatctacgacattaccaatgtcctcgaaggcattaacatcctggagaagaagtcgaagaacaacatccagtggcgctgcgggcagtcgatggtcagccaggagcgttcccgtcacatcgaagcggattcgttgcggctggagcaacaggagaacgagctgaacaaggccatcgatctgatgcgcgagaatctggctgagatctcccaggaggtggagaactccggcggcatggcctacgtcacgcagaacgacctgctcaacgtggatctcttcaaagatcagatcgttatcgtgatcaaggcgccgccagaggctaagcttgtgctgcccaacacaaaattgccgcgcgagatttacgtgaaagcggagaacagcggggagatcaacgtcttcctctgccatgacacctcaccggaaaattcgccaatcgcgccgggggccggctacgttggagcacccggtgcaggatgcgtccgtacggccacctccacacgactgcatccgttgaccaaccagcgactgaacgatccgctcttcaacaatatcgatgccatgagcaccaagggattatttcaaacgccctaccgctcggctcgcaacctcagcaaatcgattgaggaagccgccaagcagtcccagcctgaatataataacatttgtgatattgcgatgggccagcatcataatctgaaccagcagcagcagcagcaacaacaacagttgctacagcagccggaggaggacgatgtggacgtggagctgaaccagctggttccgacactgacgaatcctgtggtccggacccatcagttccagcagcaccagcagccctccatccaggagctgttcagcagcttaacagaatcctcgcctccaacgcccaccaagcggcgtcgggaggcagcagccgcagcaattgccgcaggcagctcaacaacagcaaccactacgcttaatagtcataacaacagaaaccacagcaatcatagcaaccacagcaaccatagcagcagcaacaacagcaaatcccaaccacccacaataggctacggcagcagtcagcgacgcagcgatgtgcccatgtataattgtgcaatggaaggcgcaaccacaacatctgcaacagcagatacgacagctgccacatcgcgatcggccgcagcaagctcactgcagatgcaattcgctgccgtcgcggagagcaacaacggcagtagcagcggcggtggtggcggcggcggcggctatggcagcatcgctggcgctggcgccaacgctgatccccatcagccgtacagccatgaccgcaacagcctgccgcccggcgtggctgactgcgatgccaacagcaacagcagcagtgtcacgctgcagggcctcgatgctctcttcaacgacattggctcggactacttcagcaacgatatcgcctttgtgtccatcaatccgccggacgacaatgactatccgtatgcgctgaacgcgaacgagggcatcgatcggctgtttgacttcggttcggatgcctatggaccctaagaggagacgtccacgaacacaatcacaaccacacacacacacacacatgtctacaaaattgggattctgggggtgtttataattttaaattatatacaaatggcaaaagaaaaaaaaagatacaaagccagccagcaaattattaaattatttgattgcaaatactagaagccacaaaaaatccaaaaacaaaacacaaaaaaaagcgaatcagcaaaacttaatgaaactaagttgtgtgtacaattttaagcgtaaaaatatatacatttaaatttataacccaaactaatttaagcgaaacaaaacgaaaacactaaatctactttacaaaaactcagcctcacgagagaaatagggagaagtcgtagcaagaagagccacattttataagcaaattttaattttagcctttaaaagaaagcaaaaagaatcaggaatactatttaaacgattggataacacacaaaaaatgcgaatacttccctcttatcaaacaactttttgggctagaactgtctgtaaattagtaaaaataataccaacacacacacacacacacacttatataattttaaattataaaacaaaatagttgtaaagccaatcaacattaaacaataaaaagaaaatcaatttcaaattgtaaaatatatcgaagacatttcaaattaatatggagcagtagtagaagaggaagagaacactcctgggcccccaacaagatggctttggttcctgttttagtgacgcatgcaacagaatcctcttctcttcatttgcttggatttatcgattgatttttaattataatattattaaagctataactatgtatcataatttgttattgttataaaatttaaactgtaaacacacacatgggcccaatagcagtttattcatagaagccaaatcatcccacaaaacaaacaaccaaccacttaacagagtcaactacaagtacataaataattatttaaactctctcctagtagttatatatttaactaaacgatagataaaagcaacaaacaaatgcaaatcatacaattgtaaaaaaaatcaataaataaacgaaggagaaccgcaacaagccgaaaccactgtataattgtacgtttaatttttataagagaaaacacacttgttaggtacttttctttctttccaaaaacaaacacatgaaaaaaagagaaaataaatattacaaaaacgaaggaaactttaaaataaacaaaataaatggaattc

SEQ ID NO: 113 - protein, 805 aa, Drosophila melanogaster
MSKFFVNVAPINNSNSSSSHTTTSSNTQRHQQHQQHYGGSGTTGHTMVARRLNYDLHGGTTSINNNNNIVIKNESVDLDYDHVLSSSDSNSNGGVAAHLRDHVYISLDKGHNTGAVATAAAAATAGQTQQQLQQQHHHQNQQQRKATGKSNDITNYYKVKRRPHAVSDEIHPKKQAKQSAHHQTVYQKHTASSAPQQLRHSHHQLRHDADAELDEDVVERVAKPASHHPFSLSTPQQQLAASVASSSSSGDRNRADTSLGILTKKFVDLLQESPDGVVDLNEASNRLHVQKRRIYDITNVLEGINILEKKSKNNIQWRCGQSMVSQERSRHIEADSLRLEQQENELNKAIDLMRENLAEISQEVENSGGMAYVTQNDLLNVDLFKDQIVIVIKAPPEAKLVLPNTKLPREIYVKAENSGEINVFLCHDTSPENSPIAPGAGYVGAPGAGCVRTATSTRLHPLTNQRLNDPLFNNIDAMSTKGLFQTPYRSARNLSKSIEEAAKQSQPEYNNICDIAMGQHHNLNQQQQQQQQQLLQQPEEDDVDVELNQLVPTLTNPVVRTHQFQQHQQPSIQELFSSLTESSPPTPTKRRREAAAAAIAAGSSTTATTTLNSHNNRNHSNHSNHSNHSSSNNSKSQPPTIGYGSSQRRSDVPMYNCAMEGATTTSATADTTAATSRSAAASSLQMQFAAVAESNNGSSSGGGGGGGGYGSIAGAGANADPHQPYSHDRNSLPPGVADCDANSNSSSVTLQGLDALFNDIGSDYFSNDIAFVSINPPDDNDYPYALNANEGIDRLFDFGSDAYGP

SEQ ID NO: 114 - DNA, 1595 bp, Drosophila melanogaster
cgcgcctcaacatggcgttggcttacatccttttccaagtggcggtcgccctactggcgatcttaacctactatattcaccgcaagctaacatatttcaagcgtcgagggattcccttcgttgcaccgcatctcatcaggggaaacatggaggaattacaaaagacgaaaaatatccacgagatattccaagatcactataacaaattcagggaaagcaaggcaccttttgttggatttttctttttccaaagtcccgctgcatttgtgatagatcttgaattggccaagcaaatacttattaaggacttctcgaatttctcgaacaagggtatattctacaatgaaaaagatgatcccatttctgcccatctcttcaatctggacggtgcccagtggcgtttgttaaggaacaaattatcatcgacctttacatccggtaaaatgaagttaatgtatccgaccgtagtgtcagtggccaatgaatttatgaccgtgatgcacgagaaagtgccgaaaaattcggttctggagatacgtgatctggtggccaggtttacggtggatgtgatcggaacctgcgcctttgcgatccaatgcaacagtctgcgcgatgaaaaggccgagtttctgtactttggaaagaggtctttggttgacaagagacatgggactctattgaatggctttatgcgcagctatcccaaattggccaggaaattgggtatggttcgaactgcaccgcatattcaggaattctatagtagaattgtcacagaaacagtggcggtgcgagaaaaagagcacatcaaacgcaacgatttcatggacatgctgattgaacttaaaaatcaaaaggaaatgactctagagaatggcgatgtggtcagaggattaaccatggaggaggttttggcacaagcctttgtgttcttcattgctggctttgagacatcctcctccaccatgggatttgccctatacgaactggcaaagaatccggacatagagcaacatgaccaaaactttacctacgagtgcaccaaggatctgaagtacctcaatcaggttttagatgaaactctgcgactgtacaccattgtgcccaatctggatcgaatggccgccaagcgttacgtagttcccggtcatccaaacttcgtcatcgaggctggtcaatcggtcatcataccctcatctgccattcaccacgatcccagcatttaccccgaaccctttgagttccgacccgagcgattctcccccgaagaatcggctggtcgtccctcggttgcctggctgccttttggagatggtcctcggaactgcattggcctgagattcggacagatgcaggctcgcattggacctgctctgctcatcaggaactttaagttctccacgtgctcgaagacgcccaatcctttggtctacgatcccaaatcattcgtacttggtgtgaaagacggaatctatctgaaggtggagaccgtctaataaacagactgaaaactctcaactaaaagccaaagcttctaacaaaataactgataaaatagatggtaatttattcaacctaaaaaaaaaaaaaaaacg

SEQ ID NO: 115 - protein, 494 aa, Drosophila melanogaster
MALAYILFQVAVALLAILTYYIHRKLTYFKRRGIPFVAPHLIRGNMEELQKTKNIHEIFQDHYNKFRESKAPFVGFFFFQSPAAFVIDLELAKQILIKDFSNFSNKGIFYNEKDDPISAHLFNLDGAQWRLLRNKLSSTFTSGKMKLMYPTVVSVANEFMTVMHEKVPKNSVLEIRDLVARFTVDVIGTCAFAIQCNSLRDEKAEFLYFGKRSLVDKRHGTLLNGFMRSYPKLARKLGMVRTAPHIQEFYSRIVTETVAVREKEHIKRNDFMDMLIELKNQKEMTLENGDVVRGLTMEEVLAQAFVFFIAGFETSSSTMGFALYELAKNPDIEQHDQNFTYECTKDLKYLNQVLDETLRLYTIVPNLDRMAAKRYVVPGHPNFVIEAGQSVIIPSSAIHHDPSIYPEPFEFRPERFSPEESAGRPSVAWLPFGDGPRNCIGLRFGQMQARIGPALLIRNFKFSTCSKTPNPLVYDPKSFVLGVKDGIYLKVETV

SEQ ID NO: 116 - DNA, 2241 bp, Drosophila melanogaster
cgaacccgagagcgaaagactccgctatcggattcggaaatgccgttcggggggtataaaagcgggcgctctgagcgagacaccactcattcgttgtctgaccgctcgcagcaaaagatatagaaatcgagaacgtaaacgcagaaaacacgctggattaaagtgtttcgtttcgaacatcgacagagtgagaaaacaaagtgaagtgagcgcacaaagccgaaatcaaatcaaattgaaaagccagtcaagagcaatctttaactgaacctcgcaagtaatccggtacgaccgtgtaacaaccgccaagattctactcaaggagcgtaaagcaatcatctccagaatgaagtccctgacggccgtctgccagacaggtgcctccggaatgccggccttgaatgccagcgggcgcatccagcgccatcccacgcaccgcggcgacggggagaacgccgagatgaagatgtatctgtccaaactgaaggacctcgttccgttcatgcccaagaacaggaagctcaccaagctggagatcatccagcacgtcatcgactacatctgcgacctgcagaccgagctggagacgcaccccgagatgggcaacttcgatgcggcagccgctctgacggcggtgaacggactccacgaggacgaggacagcgacatggaggatgcggatgccgaggcagaagcggaagtcgatccagatatcctcgcccagcgcctgaatgccgagcagccggcgaaagtctctagtcccgccgcccgtctcccgcttaccgatcgccaaacgcccaacactcttgtggcgcccgcccatccgcagcagcatcagcagcagcagcaactgcaactgcagcagcaacaactgcaatcacagcagcaactgtccaacagtttagcaacggtgagttaacaaacaaattgctagtaatttgaatcttccgcttctctcttttagccacagaatgcggagaaagacagcagacagtcgtaagcgtggaaacacccagccgggaaaacccacggaacctataagcctattaactaaatgcataatgaaagtacagtcaaaactccactcgcaaccttcgtgtgaagatctccgcataagataacgtgtgaaactctcaagaaaaccacagcccaggcgcatctcttcaacgctccttttcccgggaaagggaaaacccgggaaaacgagacctcgcttttggctccaacagagtttagtttaaacatttaataacaagaatacaacaacacaaaacctagcattagagcagcgtaagcaagtacacattatgattattaattaaacattacaactaggatgatggcgcttaagaatgaacggaagaaagaaaacttggcaaagctttaaacaatttaattttcctttaacgcttgaaattacactgaagcatatatttttgttttcctaattttagttttgttttggttaaaacaacgcaagaaaaaatgttactaatgcaaagcaaacagagattagcaataaaaaaaaattataaaaatgcacaggcaccaaactggaattacgttgaatcaccgtttcctgcattacgattatatgatttcaatccaaatgattttcctattaattttaatcaatgaagagttttcctattattgattagccacagccaataaacaacaagaacaaccaactcagcagcacacacacattcaaattcattaatttatatcgagagagtacgtttagagtttaagttcgagaaagttcatttccaggcactaattttcactcacaccactcacatagaaaaacacaaacacctcattttgtagttttccgagtcccttggatcgttttcctcttttttaatcgaaataacgcataatgcataataattattaccagatatacactaaaacctataaatatatattaatatatgttctgtgatctgtagcatactttgtacaaagtgttttttttagcataattatgcgattttaattatgatccgcaatcgaaattagagatttttgttctcatttcgatggtaaaaacactctatcatgatgtaaaaaaaaaaaacaaaagaaaacatttgcatgatgttgcgaaaaaatatattatctaaaacataaagaaaaacaaacactagcctcttaataaattgcaaaaatttaaaaaacattaaaaatcgaatatgtcaatggatttccgttgggagcaggggattaagaaac

SEQ ID NO: 117 - protein, 199 aa, Drosophila melanogaster
MKSLTAVCQTGASGMPALNASGRIQRHPTHRGDGENAEMKMYLSKLKDLVPFMPKNRKLTKLEIIQHVIDYICDLQTELETHPEMGNFDAAAALTAVNGLHEDEDSDMEDADAEAEAEVDPDILAQRLNAEQPAKVSSPAARLPLTDRQTPNTLVAPAHPQQHQQQQQLQLQQQQLQSQQQLSNSLATPQNAEKDSRQS

SEQ ID NO: 118 - DNA, 3758 bp, Drosophila melanogaster
agtttgtcagcgtatccctaccatgcggatgtgctcgcggattgatttcgactcgaactccggctccgttttcgtcttttaacgtaagtcccgtgcgaaaaagttgaattcgactccgtgtttgttcagttatttttttgcgcggttttcgaaaaagtgaaagaaataaggaaattcaaaaagcgggggaggcataaatgatatacagctaacggtacttatgtatgtgcatacagcaagataaaaatgtggctgctagaaaagtaaagcccggtactgtgccagataaagcccaacgctactaagtctaaagaccccaaaattaatttgacacaataatattttgccaacaacaaatagcaaagtcgaattcaaacggttaaaccaaattgaagtcggaaaataacaaaaaaagtctaaacaaaataaagagcaaaagcaaacgcaaataagagaatagagagaaatatttattatttgcttataaggccaaactaaatatttgccgccgcgaaatatttaaaaggtgttaagtgtttcgtgggagtgaagtttttaaacagggaaaataaatcaaatacacgtattcaatggtgtataagtgagtgcaagtagatgagcaacatgtgtgtgttttaaagtgtttaaagagatcgagaaaaagccccaaaagttctttgacagcgatatcgaaaaattccaaaatgtggcgtcaaatcctgtttattttacccaccctgatacagggggtccagcgctacgatcagagccccctcgatgcgagtccgtattatcgcagcggcgggggattaatggccagttctgggaccgaactagatggactgccacatcacaatcgctgtgaacccatcaccatatcgatctgcaagaatataccatataacatgaccattatgccaaatcttattggccataccaagcaggaggaggcgggtctggaggtccatcagtttgctccgctcgtgaagatcggctgcagtgatgacctccagttgttcctctgttccctgtacgttccggtctgcacaattttggagcgacccattccgccttgtcgatctctgtgcgaatcggcgcgggtatgtgaaaagttaatgaaaacctacaactttaactggccggaaaatctggagtgctccaaatttcccgtccatggaggcgaggatttgtgcgtggcggagaataccacatcatcggcctccacggcggccacgcccacaaggagtgtggctaaggtcactacccgtaaacaccagacgggcgtagaacgtccgcaccgaaacattggattcgtgtgccccgtgcaactgaaaacgcctctgggaatgggctacgaactaaaagttggcggaaaggatctgcatgactgtggagccccatgtcatgccatgttcttcccggagagagaaaggactgtgcttcgatactgggttggatcctgggcagcggtctgtgtagccagctgcttgtttacggtgctcaccttcttgattgactcgtcgcgttttcgctacccggagagggccatcgtcttcttggccgtctgctacttggtagttggatgtgcctacgtggcgggactgggagcgggcgactctgtgtcgtgccgcgaaccatttccgccgcccgtcaaacttggccgcctgcagatgatgtccaccatcacccagggccaccgacaaaccacgtcctgcacggttttattcatggcactctacttctgctgcatggcggccttcgcgtggtggtcgtgtctggcattcgcctggtttttggccgctggcctcaaatggggccacgaggcgattgagaacaagtcgcacttattccacctggttgcctgggcggtgcccgcccttcagaccatctccgttctggccctggctaaagttgaaggtatgtacttatggcagttccacaccataaactagaattatgcagagtgtaagtaatgaaatgttcatacactgatcaccaattcgacctgatggtccattaatgagtttacccaactaaagtacaagccaataacatgtagccacaaagaacgcctggcatagagcgcaatcaaatcgggagaataaacccattaccgtactcacagcccatcgtgtaccaaccagcgaggactaatcataagcccattcacataacaatcaaaggcaatttctggaattcagttcgcaggattacttctaataatttaataaacccatgaaaagtcaaaaatacgataagaacggtggaacaacggggttatggctcacccccacacggtgctataaaaattccccaccaaaacttctcattaaataaacatacccgaaccgaagacaaaggccattccatatcgagtacgcattccgaaaaactagtcccaaactaaggccgcgtaatgtcgcttgttagtactaatgatgggctggatcccagttcctctgccatattctcttgaataccccgcccctgggaaagcgcaaaaataaatttgtacatctgcgatagaagccgcgatatggaagccgtggccaagacctcggaaggccaagaatgaaagagcgttgcccatttcgcctgcttgtcataaattgccatggagcgccaacaacaagtttccttcgacttgaagccttttaggcctctttcaatttctagggatggtagcgtgatctttagtataataaaatttcttaaatacttatcaaaaagtgatacggataagtattctctatctgtatcagttatttttaattatttcagaaattgtcctacttctgaaaatatttaagtagtatataaaaataatctatatactttgcaattttttttatttaaaaactctaaataatttactttgccgtaccccaacccttttacaagccatctctaacattttgtcaagacgacccccaggtccgaccgaaacaaaaccgactcggccacagtccattggatgccgaccgtcgcgtccaggctgtaaaaattaatagccaacataataagcggcattttatgacaagcgtgcacctcagcacacttacacacagacacgctctcacggacatgcgaccacgcccctagacagcgcatctactgatttttttcggcacttgggcttttgggcaaacatttctcataggctcacacggcaaaagtcattaggtgagggatcagttggccacgcttcttcgtcgcagtcactttgaaaattacgcaaattgaaagttacatcgttatgtggccggcaaatggggaaaatcaggaggaaaacgccgcaactccccctcaactagactccaagctaaccgacaagttatgggcatcgtattggcgctgcaagattccgctttatgataattacacgcagcgttgagatttgtttttatacgattttgtccaggaaaattgaaaaacttttcgaaggcttcggtgtttgtgtgccaggaaaatagatggtcgattatgtaagaggtgatatggaaagtttatttatataaacaagctaatggattttgtggcttttaattggatgagagctattcgcgggatgatgaagtgccccataatgctggttaagctaaagtacttaacgggaaaacatatatctaatgggtctcttatttaatagtaatagtaatagattcacattttctttgatcaatgcctctctaaataccttgtgtcgtaaacagaacctgtcatataaaatggttagtttgaagctaaaaaaaaaaaaa

SEQ ID NO: 119 - protein, 415 aa, Drosophila melanogaster
MWRQILFILPTLIQGVQRYDQSPLDASPYYRSGGGLMASSGTELDGLPHHNRCEPITISICKNIPYNMTIMPNLIGHTKQEEAGLEVHQFAPLVKIGCSDDLQLFLCSLYVPVCTILERPIPPCRSLCESARVCEKLMKTYNFNWPENLECSKFPVHGGEDLCVAENTTSSASTAATPTRSVAKVTTRKHQTGVERPHRNIGFVCPVQLKTPLGMGYELKVGGKDLHDCGAPCHAMFFPERERTVLRYWVGSWAAVCVASCLFTVLTFLIDSSRFRYPERAIVFLAVCYLVVGCAYVAGLGAGDSVSCREPFPPPVKLGRLQMMSTITQGHRQTTSCTVLFMALYFCCMAAFAWWSCLAFAWFLAAGLKWGHEAIENKSHLFHLVAWAVPALQTISVLALAKVEGMYLWQFHTIN

SEQ ID NO: 120 - DNA, 561 bp, Drosophila melanogaster
atgacttggatcggtttgctcatcgttggcctcacagcaatcgctgtccagggggaagtaccgatcgtgacgagggccgagtggaatgccaaaccgccgaacggagccatagacagcatggaaactcccttgccacgtgctgtgatcgcccatacagctggaggagcttgtgcggatgatgttacatgctcccagcacatgcaaaatctgcaaaacttccagatgtccaagcaaaagttctcggacattggctaccactatctgatcggcggtaatggcaaggtatacgaaggcagaagtccaagccagagaggagcctttgccggtcccaataacgatggttccctgggcattgcgtttattggtaacttcgaagaacgggcgcccaacaaggaggccttggatgccgccaaggagctgctggagcaggctgtcaaacaggctcagctggtggagggctataagttactgggccatcgtcaagtcagtgctaccaagagtcctggagaagcactctacgctctgatacagcagtggcccaactggtccgaagaaatgtga

SEQ ID NO: 121 - protein, 186 aa, Drosophila melanogaster
MTWIGLLIVGLTAIAVQGEVPIVTRAEWNAKPPNGAIDSMETPLPRAVIAHTAGGACADDVTCSQHMQNLQNFQMSKQKFSDIGYHYLIGGNGKVYEGRSPSQRGAFAGPNNDGSLGIAFIGNFEERAPNKEALDAAKELLEQAVKQAQLVEGYKLLGHRQVSATKSPGEALYALIQQWPNWSEEM

SEQ ID NO: 122 - DNA, 1850 bp, Drosophila melanogaster
atgcgttgcagtttgcaaaaggactgcgcagctcccacgcaggaaaattttcgtcaggtaagatgatacatgctgaatacatttaaactgaactaaaaactattcattgcatttactgacattccagcagatgcgtttcccaattgtgatttccctgcttttgctgcttttctgcagcggtgagagtgtcgccgctgacgcagccaatcagctggtaagtgggcggttagtgggcgtgggtcgtttattttgggggtgtttgtttgttttcactgcgcacttgttgccttttggtcgagaccccgtttaaggccccccaattgcatgtttttcgctcgcttatcacttccagtctttgttggccgacatttcgaatggctaagaaatcaataggctgaataatgaagcgataatagtcataaaaaatgtcttgttttctttgaaataggaaaatatgtaactgtaatatgtttactttttctttagaaattttccaccacggaatgtaaactcaaggagcccatttacggcagcaccttcgacttcagtggtctccactcggatttggcccatgtggtgaagagcatgaacattggaggcgaccaattcgagttcaatatatgcggaaatctttcaagaacctgcaatggggaaagtaatgtggcagcttgtctcaaaagacagggaaaggagtatattttgggtaagttaacgatcacattatctgtatctcacacgctaagatacctttactgttcaggtcgtcagcacgagttgttctacaacaatggaaatatgtttctgaagtacaaaagcggcgcaaaatgcgacaatggcactgccgacaagcccaactaccagctgcatgtaatgttctcctgcgactatactttggatgcccagcctatgcacgtaacgccttacgtaagtatttgaattgtattccttaaatatttcgaagattctatcattctgaataacatactattgtacttcatctaggccaacgaagtgtgttctttttacatctcatataggacgcctttggcatgcctatccattcccgagggtctacaatccaatagttgcagagtgggcgacacaaagtcaaatggaaccttcgatctgatgccgctgagtgatagtaactatcatacgagcaatcgtcaaggcgccttctttgtgatcaatgtctgtaagccggtgctttatggagagaacagcatgtgtccggcaggcagtagcgtttgtctatttgatagtaaagccacaaatccaaaagaacggtgggtagaactttgattaatattgcttgaaaaatattagtcaaagattttccccatagatttatcaatttcggcaatgtacaaacgcatccggtggtggagaaagggcagctactgctcaggcatgagtcaccaacgccatgtgccaagaactccagtgcaaactacaccagcgtgatttactttagctgtgacaagttcataagggtgcgtagcttagggtttttagtttatggtgatgctaatctcatatctttcttttagaatgcccatccggagttcgcgggtctgggagccgattcctgcacctatcagttcaactttgcaacgcctttggcctgtaatgatctcaaaccgtgcacggcctttacctcgacaaatgagctgtgagttgtctatacacttaagtataaggaatccgtgttaagtacttgttgtgccctcttaacaggttggatctgagttcgcttagctctaagccagctcgcactttgcttaaggatggcaagaactatacaattgctgtgtgcgcacatgctggggcgccctgccaggaaaatggcg

SEQ ID NO: 123 - protein, 378 aa, Drosophila melanogaster
MRCSLQKDCAAPTQENFRQQMRFPIVISLLLLLFCSGESVAADAANQLKFSTTECKLKEPIYGSTFDFSGLHSDLAHVVKSMNIGGDQFEFNICGNLSRTCNGESNVAACLKRQGKEYILGRQHELFYNNGNMFLKYKSGAKCDNGTADKPNYQLHVMFSCDYTLDAQPMHVTPYANEGLQSNSCRVGDTKSNGTFDLMPLSDSNYHTSNRQGAFFVINVCKPVLYGENSMCPAGSSVCLFDSKATNPKERFINFGNVQTHPVVEKGQLLLRHESPTPCAKNSSANYTSVIYFSCDKFIRNAHPEFAGLGADSCTYQFNFATPLACNDLKPCTAFTSTNELLDLSSLSSKPARTLLKDGKNYTIAVCAHAGAPCQENG

SEQ ID NO: 124 - DNA, 3178 bp, Drosophila melanogaster
gaattccgtttgggttgcgtgcgatcgctggttgatcagaaatttcacatccatacccagagtggactcgtggcgtttgcgcacggggcgcttgctgcccattacgatgggccttcttgttctggttgtgatttgtgtggttcttggacttggccatcttaaagtttttcgcacactggaattcctagggaaacctttcccgcgaggagtccgtgaagcgcatcaacgagcgcatcgcaacccagaagggcaagccaaagcctgttactctgtagatgattgccccgcgtgtggataattaaaggacaattcagaataacaaaaaaaaaaaaaaaaaaaaaaaaaaaaaaaaaaaaaaaaaaatcaaataaatgtaatttaaggaacgaaagaagaaaaacaacaacaccaaacatactgattgtcgcgcggggaatgaaaacaatgtacatatagttactatagcgcattaatttatcgcccgtgcctgagcgacgtcgtgaagtgctcacaattaattgccttaattcgcaaaagtgctaagaattcgcgacggtgtgtgaactgcgaatgctgcaaattacgtgtatctgaacaagtgcgatcgtaaatacacacatacttattaaaaaaaaaatcccgctagctaagcagggatttggtaatatcacaccctcatacctcaaaacttatcaattgtccagcgggccatccaattgattagaacccgcatccacaaaaaaaaaaaaaaaccgaaagcaaaccaaattcataaaccacacaaaaacgaccaaaccacatatatgcatttactgacagtgcaaaaattaaaatatacccccaaatatcaaacaaaacccgagaaacgaaagtgaagtgaaatcaattttaatacaactgcaagtaccaccagcataagggacaatccattctaatcaattgagagctgatcccgcagatttgcctagttcagagtcaatgacgtgcactttgaccagcgaggtggagtttccgtttttgagtaccgatcattttgaagcgaagaaatgccgccctctgcgtttttagtgaatgccagcataatcagtgccgccaacgccttggacagcgataaggagcagcagcttcaggagcatctcaatcagagtcacttcaccagcagcagcagcagcagcaacagcagcaacaataacaattgccacacggcgcccaactacaacatggtcctgcaaagctatgagaactatcccagctaccacctggctcagcatcatcatcatcatcatcatcaccacagccatccgcatcaccaattggcgcagcagacagggctgcacagccatcatacgatgcaacagcagctgcagcagcagcagcaatccctactcctgcaacacccgcaacaacagcagcagcagcacagccaccagtcgcaacagcagcagcaacacggatacggatcatcagcccagctgccccatcatcgtttatccggcggcagtacgggcagcaccaccaccacctcctccggctccagttcgagtggctcctcgtcgagtgcctcatcgcagggattcgccaacgggagcgcgactgcgaacaatctggtgggggcgttgagcagctccacggctgcttcgctgggactgggctacttcaatgatatggcgccctttgtgggcgatgcgaatgcctactacacggactcggatgtcaacttctttagttcaggctacaacaccagcaacacacacgaccgcatcaacaacagcacgcccccgcagcagcagcaatcgcagcagccgactgtcaatggcagcggtagcgccagcagcaacaacaataactccatgctaccgcccgctgtacagcaaagcaacaacgaaaataacaacaccagcagcagcaacacaaacaacagcagcaacaacaacaacaacagcggtggcagcaacaattcgaatgcgggcagcaataacaacaataataacaacaataatattaactttatggcagcggcggcgatcttccaacatcacctcaaagaggagccgggcacccagaatggtaatatcggtggctatggtggtggcagtaatagccagaacgatcccacggatctcagtagttatggattgcccgcccacctggccgcttacggtggtgggagtggcagtgggccaaccggcggcaggagctccggtggcggtggcgatgaaagcgattatcacagcacgatctcggcgcaggatcaccagagtcagcaatcgagtggaggaaatggcagtggaggagccagcggtggaagcaccggaaacagcaacggttacttggacagcagctcggagttctatggcagttacgcgggcaggaatcgattccacgatggttatccaccggaatttacgccctatgatgctcaatccttccagtcgatgggcccccagcccacggccatggatcagtggggagcagcccatgcccaccagcatccggcagcgtatatgagcaccttgggtctggataagggcctgctgggtggctatacgacgcagggcggagtgccgtgcttcacgggatcgggtcccattcaactgtggcaattcctgctcgaattgctgctggacaagacgtgtcagagtttcatttcgtggaccggcgatggctgggagttcaagctaacagatcctgatgaggtggctcgtcgttggggaattcgcaaaaacaaaccgaagatgaactacgagaagctgagtcgcggtctgcgctactattatgacaaaaacatcatccacaagacggcaggcaaacgatatgtctaccgctttgtctgtgatctccagaatctagttgggcacacacccgaggagctggtggccaagtatgatcttaagattgagaaaaaagatgtggattagcagcggagcagcggagaagctgcctaaaacgggaacagctccaggagatctgcgcccagccacggattgtactcaaccaaccgcaaaatactttcgagcgttattgtttaccaagcgtgatgttagcttttaagcagctacccacgtctgcgatcttgcaacgagattaaagtgttggcaacccctaagtacccaaagtcctgactccccccccccccacacacacaaaaaacacaaacaaaaagaaagcccccgaattc

SEQ ID NO: 125 - protein, 623 aa, Drosophila melanogaster
MPPSAFLVNASIISAANALDSDKEQQLQEHLNQSHFTSSSSSSNSSNNNNCHTAPNYNMVLQSYENYPSYHLAQHHHHHHHHHSHPHHQLAQQTGLHSHHTMQQQLQQQQQSLLLQHPQQQQQQHSHQSQQQQQHGYGSSAQLPHHRLSGGSTGSTTTTSSGSSSSGSSSSASSQGFANGSATANNLVGALSSSTAASLGLGYFNDMAPFVGDANAYYTDSDVNFFSSGYNTSNTHDRINNSTPPQQQQSQQPTVNGSGSASSNNNNSMLPPAVQQSNNENNNTSSSNTNNSSNNNNNSGGSNNSNAGSNNNNNNNNNINFMAAAAIFQHHLKEEPGTQNGNIGGYGGGSNSQNDPTDLSSYGLPAHLAAYGGGSGSGPTGGRSSGGGGDESDYHSTISAQDHQSQQSSGGNGSGGASGGSTGNSNGYLDSSSEFYGSYAGRNRFHDGYPPEFTPYDAQSFQSMGPQPTAMDQWGAAHAHQHPAAYMSTLGLDKGLLGGYTTQGGVPCFTGSGPIQLWQFLLELLLDKTCQSFISWTGDGWEFKLTDPDEVARRWGIRKNKPKMNYEKLSRGLRYYYDKNIIHKTAGKRYVYRFVCDLQNLVGHTPEELVAKYDLKIEKKDVD

SEQ ID NO: 126 - DNA, 3208 bp, Drosophila melanogaster
tactcagcgtaaaataaataaaacaacgatgaataacactgcgttgactcgctcaacgtccgccgtcgtaaaagacacgcggttttagcaaaactacttcaaggactaaacgtctgaggacgtggagaccggtgaaggtgacttagaagattctttgggctttttccaaccaatgtatacatgcaaatcactatatttaacttatagagccgttaaagttttaccgcatttcccactttcacaagaacaggcgagagacacttatattcaatgccaattagcgagatgtgacttttgttgacgtattttttgaaagtataaatgtattaattgttttagtttaaaaacattttaatttatgttatattatattttcatattaacaaagaagttaaaattttaatataaaaataccaataaaaataaagcatttaacatgtttaaaccagaaagacacatcgatggtcaccagacgacttttttacggaagggacgtcgctaccatattctacgcacggggtttaggtcacagggcgggtgcaagcgtacctttcggtacttttcggggtttaaacgctagagggccgaccttttaagccgatgacgacgctctgacctgtcttagtgtgacgagggttcggcctctggagagggttcctcgcagctaggcctaaagggtggtaagacagtgggcgtcaaaacctactccgcgcagcgttaaagctcgtgaactacgtacctcaacgcgtctaaggccacgcggcaccgaaagggctaaaacgggtaccggaccaaaaggtgagctgccggttcctactggaagtgttgaagcggtatagcttgtcacggtaacttgttcactactggtgggtcaacaaacccttcttcctcgtccacgggcatcttctaaagtagtggttgttacacgggtagttcaagtgactctgaggcgaccgtgtggtaacggttggcgggggtcaaacgccgttataagccagacaaatagcgtcgtacctgccgtgaacgttattaggtcttggtgtctctagagacaccccacgacgaccagttggctacctcgcgtacgacggggggcggatacttctaccatagacctgtggcgcacgagtgagaagactgccgtgaggcgacaacccgcgggcattttagagtgcttgagacgagagcctgcaactagcaggagtaggattcatgttagaataccactacgtcaaacctgttcagaaccattcattagttcattttcggtggataatcactttcgaattatttctttagtgtacctagatatgtatacccaccccccggttatttgatcaagaaaccaattatttatttcaattatataagtaaaaggtccgagtactgtaaagtgtttgaagaagttaggccgagctcctaccgtcggaccacgttacgacaagggggcttccttttcatcgagagtcaggagtcgtttcggtaaaacggacgtacggctaggtgcaactcggcctactactcaagaaaagtcgaaaacctcacgcaacaaacttgaaacaatctaacagaaaccacggatcagggctgacggttgagtcaatgccgtttgtcgactggttccactgtgtgaaacacctgcggagcggccagatacctagctcactacttcgtagagcatcaaattctcggaaggcgcccccggctaacgcttactacttactaaaaccagcactagacgacgggaactgtttgctgttcttccgtacagggtcactccttcggcctttcaggacaaaggtaagcccatttagtgataattcgttacacaaagaataataattaagaaattattgtataaattgtgctaatccacaataagtgacgagaatgaaggtaataacgactacgccaagaaaaaggaagatgtaaatcctctaccggcttgtttggtctagtatagggactagtgggaagtttaagacgaacgggctctcgtgttggcacatcggccacgtgatgtgcttgatttaggcagtcggtcgctactttgcgaaaaggtccttcgagctgcgtagcagtaacggctctacgtcgtatagtggatgttgctcaagaacgggtaatattatcctggtgttgtctacttcgcgaaggcaaaccacggcgaagtggtcccgataagggtactgatgttacaattacacttaggtcgatagtgtttgcttaagagcccgcgacggatagcgtacccggtaaggtccattctttataaactaatgacgtttgcttttatattaaaattaaatatacaggctaaattcacaactaccattcaaggtttaggcggtccttgtaccagcgtagctacttcaccagttatatggtctacactacaagttaggaagtgcctacgcgttcgcgctcaaaatgctgctgtacgacgcgtgagatatgtcggttgggtacgtcgtccacctgtcgagttagtcggtccctcatccctaattggaattaattgatttaagtgcaccaaacgattagcgaagttggaactcgtcgagtcagcgaaagacaaagcgcccctgttaggcaaaccggacctagatcgacggtaattgtaagtcgctcctgcgctggtcccagacgcatcgatgttgctaatgaaccttaactacccacgtgggtttgacgtatcgaaactcgtcaagggttaacttcactcatgaacccgttatcgagagctgacatcagttgattaagaatacattatctaacgggtcttcgacagcgcgcaaatggcatgtgggctactgtaactggagacccacccaccggaagacctcttccgtcagctcccaccacatcaccctcactggaaacgactctagtatcggctagtcaaacgtgcgaagttcgtcccgctagcgatgatgatactcatgctgttaccatagttaggaccgcgtaagttgggagacgtcgacgtcctttaagcgttccattgcaaccgggctgaggacacactgttgaggctagcggaatgcgaggttcgacacggtaaccgacgtaagcatgcacgactagtagggcccattcacctcacacgttgaattcgacacgtcaaggaaattgaataaagaaatatcgttggtttactaaccgacactactagggttggacggaagacaattgaacctccgtaccg

SEQ ID NO: 127 - protein, 808 aa, Drosophila melanogaster
MSRILFILLLLIVTQLSELQAAAFSVRQNRFDEVPDLQTPAPLATSTESSKKPEKATSGLLKKCLPCSDGIRCVPQIQCPAHVRMESHEKPQICDLPAGKFGYCCETGQNHTAPKPETSPKERRSGFPTILSPAVLDEARRNFEHLMHGVAQIPVRRGFPDFAHGLVFHSTAKDDLHNFAISNSAIEQVMTTQLFGKKEQVPVEDFITNNVPIKFTETPLAHHCQPPPVCGNIRSVYRSMDGTCNNPEPQRSLWGAAGQPMERMLPPAYEDGIWTPRAHSSDGTPLLGARKISRTLLSDVDRPHPKYNLMVMQFGQVLAHDISQTSSIRLEDGSLVQCCSPEGKVALSPQQSHFACMPIHVEPDDEFFSAFGVRCLNFVRLSLVPSPDCQLSYGKQLTKVTHFVDASPVYGSSDEASRSLRAFRGGRLRMMNDFGRDLLPLTNDKKACPSEEAGKSCFHSGDGRTNQIISLITLQILLAREHNRVAGALHELNPSASDETLFQEARRIVIAEMQHITYNEFLPIIIGPQQMKRFRLVPLHQGYSHDYNVNVNPAITNEFSGAAYRMGHSSVDGKFQIRQEHGRIDEVVNIPDVMFNPSRMRKREFYDDMLRTLYSQPMQQVDSSISQGQLSRFLFRGDNPFGLDLAAINIQRGRDQGLRSYNDYLELMGAPKLHSFEQFPIEIAQKLSRVYRTPDDIDLWVGGLLEKAVEGGVVGVTFAEIIADQFARFKQGDRYYYEYDNGINPGAFNPLQLQEIRKVTLARLLCDNSDRLTLQAVPLAAFVRADHPGNQMIGCDDPNLPSVNLEAW

SEQ ID NO: 128 - DNA, 3178 bp, Drosophila melanogaster; identical to SEQ ID NO: 124

SEQ ID NO: 129 - protein, 623 aa, Drosophila melanogaster; identical to SEQ ID NO: 125

SEQ ID NO: 130 - DNA, 67 bp, Drosophila melanogaster
acattctcagtcgtcgtcgtcttcttcttcgttgtcgttacgttaatacgtcggacgcacacgctca

SEQ ID NO: 131 - protein, 22 aa, Drosophila melanogaster
CKSQQQQKKKQQQCNYAACVCE

SEQ ID NO: 132 - DNA, 4519 bp, Drosophila melanogaster
agtgctgtagtggtgcgattaaataatactccacaaaaggccaaataaattacataaaatctaaatcggaataaaaataagtgtattctccctccgtgttgtgttcaaagtatttaaccgattgttttcattagtcaaattaatgtagtacaacgatgagtgtgagcccagtttcctagaaaaataagagggcataaaaaataacagacacatacagcgtctcgtttcttataaattttcctactgcgtcggaattattgtcttgattattgttgtttctggcgaacttttgtgatttgtttcgagaaacatactgcggcggtttcataattgtgcaaatcaagggaagcacaatacgaatgttaagaatcaaagctaagaattaaataaaattaaagccgcacacatacatatacacaggcacgcgcagagtcgaaaaaatacgcgcgctcgctctgtacagtgtgtgcgtgtacgcggtggctggctcttcttcttcattcgtgtgcccattggaatttgtaccccaaatcgaaattacaacatagacaaacaaagagcgcccgtctgccccagcacctaaacatcaacggtacacagcaacagctccaattgccaggcagcggcgctagcggaatcgcagcggcagcgtaatcacggtagcatcggattgcggcgaaaactgcagcagtaacggcaccgagcatcagcagcacttcaacattgctaccaccacagcaacttcggcgacagaggcaacaataccggctatggccaaggagaaagcatcagcaacagtgtccttgggcgagtcgaatttcagagatatcaacctaaaagacttggccgtggtcgtcgaagcggcatcgcggctgcaccaccagcaaaacgtatgcggctgcggagcggtatcgtctactgagaacaacaacaacagtcgctacggcagcagcaagtatctgacaaacggccacacgtcgcctttggcggcagcggttgctagcaacagttcgtcggtggccacgacaccgcattgcagaatgttgcacaactgcagtctgcagcagtaccagaatgacataaggcagcagacggagatattggacatgttgcggcacgagcatcagcagggctaccagtcgcagcaacagcaacaacagccgcagcagcagcaggaacaacagcagcagcaggagcaatcgcagcagcagcaacagctacagaatcctgcgcccaggaggtctccgaatgatttcattttcggtcgttacataggcgagggcagctatagcatagtttatctggccgtggatatacactctcgccgcgagtatgcaattaaagtatgcgagaagcggctgatcctgcgcgaacggaagcaggactacatcaagcgtgaacgcgaggtgatgcaccagatgaccaacgttcccggcttcgtaaacctgtcgtgcaccttccaggaccagcgttctctttactttgtgatgacgtacgcgcgaaagggcgacatgttgccatacatcaaccgcgtgggtagctttgacgtggcctgcacgcgccactacgctgccgagcttctgctggcctgcgagcacatgcaccgccgtaatgtggtgcaccgcgacctcaagcccgagaacatcctgctcgacgaggacatgcacacgctaatcgccgacttcggttccgccaaggtgatgacagcccacgaaagggctctggccacggagcactgttcggagcagcggcgcagcaactccgatgaagacgatgaagacagcgaccgcctggaaaacgaagacgaagacttctacgatcgcgattcggaggagttggacgaccgcgacgacgaacagcagcaggaagagatggactccccacgccatcgtcaaaggcgttacaaccgtcaccgaaaggcaagctttgtgggcactgcccagtacgtttcaccggaagtgctccaaaatggacctataaccccggcggcggacctgtgggcactgggatgtatagtttatcagatgatcgccggcctaccgccattccgtggcagcaacgattatgtcatttttaaagagattcttgactgcgccgtggacttcccgcaaggctttgataaggacgccgaggacctggtgcgcaagctgctccgtgtcgatccgcgagaccgcctgggtgctcaggacgagtttggatattacgaatccattcgggcgcacccattcttcgccggcattgactggcagacgctccgtcaacaaacccctccccccatctacccatacttaccgggcgtaagtcaggatgaggacttcaggtccagctatactgtgcccggggatttggagcctggccttgacgaacggcagatatcgcgactgcttagtgcagaattaggcgttggcagcagcgtggccatgcccgtcaagcgatcgaccgcaaagaactctttcgacctgaacgatgccgagaagctgcagcgtctcgagcaacaaaagactgacaagtggcacgtttttgccgacggcgaagtgatcctcaagaaggggtttgtcaacaagcgcaagggtctgtttgcccgcaagcgaatgctccttctgaccacgggaccgcgactcatctatatcgatcccgtgcagatgatcaaaaaaggagaaattccgtggagcccagatctccgagcggagtacaaaaacttcaaaattttttttgtccatacgccaaatcgaacctattacctggatgatcccgaaggctatgctatccactggtcggaagctattgagaacatgcgcaagttggcctacggagatccctcctccacatctgcagtgtcctgctccagcggcagcagtaatagcctggctgtcatctcaaattcatccgccgcctcctcaagcaattcgcccacggtgaaacgcagttcccccgtaaacgctcctcaagcttcgacggcgtctgacaaccggacattgggtagcaccagaacggggacgtcacctagcaagaagacggcgtctaagtaaacgtagtcctatttatagcaatgtgaaattaatttagttgaaatttagtgcaaacgaagcgatggcgtagaagagggcgggaatagaagtaagcttagaagtagaagtaagtgatgaaggggaaataatgatcgtgtctctagtgctaattagaaccaaatttctgttttccgatttgtattgtgcttagggcgaaaatataacactagaataaacttatctaaagtaaaatacatctataacgactaagtaaattcaatttaaaatttaaattaaatatttatatacagcatacataaatacaaatatattcgtatttagcgcgtagttagtctcaattgaaatgaattacacacggaggcaaggtggcattgtaggcttaaattaaaagtaatttcgtgaagcaaactaaaatccgtatttaaatggtataatactaggaaattatctggaaactgtaatatacataatatgtgtatgtacgtcggagaaataatttttgtttctgttatcgtgggaagatcacatatatgttaatataaattttgtaaacagtgtaactatgtacagaactatgtgagctatatgcacacggcaaaaagaccctaagtcgtggggaaggagatgggaatgagccggaaaaccatcgatgtcacaaaatcggtgtttttccagcttcacgctcaactgtttaggtaattctaatatacagtttaacgctaattatcattatttatcattctcattatgcttttcgtttacctatttgccctataatgaaatgtataagacttgacttgagctaccctaataaaagaacgaattttaaattatatttttattttgtaagggctaccactaaaaactcaacagtcgttcaaagattgtcaagattggcggtcgttgtctctccaactgactccaattgaatgtgtgtaaaacaagtcttatacaaagatatatgtaatagatgtaagacagactgcaaagtttcttgaaacaaattagttaaatgttgtaaatgtctaagttgctaccactgctactactagaacgcgcccatcccctcccatatttacctttaagctacagtaattaagtgatgagcagaggtgtagagtaaggagtcgaagttgaaagaaagcaaaaatacattttgtacatacatatcgccgttggtcgatatacatctaaacataatttaattttttgttacttttaagtaaattatttttggcgacctaagtaaattaaaattaacgcaatatgcaacaacacacataagtatacaattaattaaattaaacgaaaattacgatttattaaacgatgtcatagaacggagagccactgatagtgagagaaatctgtaaaataaatatttaaacaaattatatattatctatatatgagtaccagaacaagaatgtcaaaaaagagaagcatgtaaaaataaaaaatatattacgagtaaaacaaaaaaaaaaaaa

SEQ ID NO: 133 - protein, 752 aa, Drosophila melanogaster
MAKEKASATVSLGESNFRDINLKDLAVVVEAASRLHHQQNVCGCGAVSSTENNNNSRYGSSKYLTNGHTSPLAAAVASNSSSVATTPHCRMLHNCSLQQYQNDIRQQTEILDMLRHEHQQGYQSQQQQQQPQQQQEQQQQQEQSQQQQQLQNPAPRRSPNDFIFGRYIGEGSYSIVYLAVDIHSRREYAIKVCEKRLILRERKQDYIKREREVMHQMTNVPGFVNLSCTFQDQRSLYFVMTYARKGDMLPYINRVGSFDVACTRHYAAELLLACEHMHRRNVVHRDLKPENILLDEDMHTLIADFGSAKVMTAHERALATEHCSEQRRSNSDEDDEDSDRLENEDEDFYDRDSEELDDRDDEQQQEEMDSPRHRQRRYNRHRKASFVGTAQYVSPEVLQNGPITPAADLWALGCIVYQMIAGLPPFRGSNDYVIFKEILDCAVDFPQGFDKDAEDLVRKLLRVDPRDRLGAQDEFGYYESIRAHPFFAGIDWQTLRQQTPPPIYPYLPGVSQDEDFRSSYTVPGDLEPGLDERQISRLLSAELGVGSSVAMPVKRSTAKNSFDLNDAEKLQRLEQQKTDKWHVFADGEVILKKGFVNKRKGLFARKRMLLLTTGPRLIYIDPVQMIKKGEIPWSPDLRAEYKNFKIFFVHTPNRTYYLDDPEGYAIHWSEAIENMRKLAYGDPSSTSAVSCSSGSSNSLAVISNSSAASSSNSPTVKRSSPVNAPQASTASDNRTLGSTRTGTSPSKKTASK

SEQ ID NO: 134 - DNA, 2606 bp, Drosophila melanogaster
atgtgtgtacgttttcagatgcccagaacaaggagactccaccactcaagggatcgctcctcggcgggcacacgagacaagcgccgacgacacgatactgccgatcattcgccacccctagctgaggccccatcgccgccgcgcatcaccaacacacatcacacaagatcggcggccaagcgaaggcgacacgagctcgatgccaagaaggcccagatatccaaggaacccactttcgatgacagcatctcaacccgccgacgcaaggagcgttcaaagcgttcgcaccgcaagtcgcccgccgccagtcgacggcagcacaaataccgctacagggacgagacgtcccattcgagctcccgccggcggcaccgtgatcgcgccaaggacgaacgcgacagcggacgcaacaaccgccagtcgcaggctaagacagcaaagcccgtcattcaagatgatgctgatggtcacttaatttaccacaccggagacattctccatcacagatataagatcatggccacactgggcgagggaacttttggacgtgtggtcaaggtcaaagatatggagcgtgattactgcatggctttaaagattattaagaacgtggaaaagtaccgcgaagctgccaagctggaaataaatgctttggaaaagattgcccaaaaggatccgcattgtgatcatttgtgcgtcaaaatgattgactggtttgattatcatggacacatgtgtatagtttttgaaatgttggggctcagtgttttcgattttttgcgagagaacaactatgagccatacccgctggaccaagtgcgccatatggcctatcaattatgctactctgtgaaatttctacatgacaatcgtttaacgcacacagatctcaagccggagaacatactcttcgtcgactcggattatacttctcactataatcataagattaaccgcgaggtgcgccgcgtcaagaatacggacgttcgcctaatcgacttcgggtcggccaccttcgaccacgagcaccacagcacaattgtctcgacgcgacattaccgcgcgccagaggtcatactggagctggggtggtcacagccgtgtgacgtttggtccattgggtgcatcttgttcgaactgtatctgggaatcacgctcttccaaacgcacgacaatcgcgaacacttggccatgatggagcgaatcttgggacaaataccatatcgcatggcacgcaaaaccaaaacaaagtacttctatcatggtaagttagattgggatgagaagtccagtgcgggtcgctacgtccgtgatcactgcaagccgttgttcctgtgccagctgagcgacagcgaggaccactgtgagctcttcagtctgatcaagaagatgctggagtacgagccgtcgtcacgcatcacgttaggtgaggccctgcatcatccgttctttgataggctgccaccacaccatcgagtaggtgaggtcagcaacaagcagcccctttcgtcgggcagcagcagccgcgaacgatcgcatagcctctccagatgagaattacagcgatttggttattgttgacagacagcgctaattaagcactcactcatgcaaacatacactcaaggcagtcgtccagcaacgtcttgcacccgactcgtagagtagaccagcaactttacgacgaaccctattttaagagcaaaagtcttattttaaatttttgaacttgacttgtatagatgtttattatacaaaaatccattgatcccttttgatcctttgtttccaaatacttcgagcacatgttgctgtgcattatatttagagctgtgtagcgccatcgtgcgcttgtgcattgtaccatacccgccaacagtgtttgttctgtaatgataaccaaatcgtgtatattattgaaagtgcggtgcgtcttcccgacaccagaacctaattgtaaatgtcttgcattgtgcacaccccaaggtggaggagactaattgaaccgactgcaaaccgataattggaatatacaaatgtagttgtaaaataagaaaggttcgcttaagcgctagttggaatgcatccccatgtctacacctgtcactgaaccgggagccgactaatttgtaattaatgcaccatttcgagagcgtgaactgaaagctaatgcaagccattatgtacaccgcccacgaatgtacggattattgtaaatgtaaagagcaattgttatgccaccatgtgtacacttcagcgatcgcagcgcattttgtgtaaattcagtagcagccccagagtcatctctcttagaatacgttttcaaatgtgtagaaccgttgccggcctgttttgttcgttttcgtttacaaccgaatatcgaaagatcaacccatttacacattgctacacacagagtataattgaatatacttatacatacttaattcaaatgattgtgagttagtttaatattacataaatattaattataaattacattatttgcaatttaacccgatcaaccagcatataagataaaaaccaatattgtcaagttattaaaaagtgaaataaatcttaaataaaaaaaaaaaaaaaaaaaa

SEQ ID NO: 135 - protein, 517 aa, Drosophila melanogaster
MCVRFQMPRTRRLHHSRDRSSAGTRDKRRRHDTADHSPPLAEAPSPPRITNTHHTRSAAKRRRHELDAKKAQISKEPTFDDSISTRRRKERSKRSHRKSPAASRRQHKYRYRDETSHSSSRRRHRDRAKDERDSGRNNRQSQAKTAKPVIQDDADGHLIYHTGDILHHRYKIMATLGEGTFGRVVKVKDMERDYCMALKIIKNVEKYREAAKLEINALEKIAQKDPHCDHLCVKMIDWFDYHGHMCIVFEMLGLSVFDFLRENNYEPYPLDQVRHMAYQLCYSVKFLHDNRLTHTDLKPENILFVDSDYTSHYNHKINREVRRVKNTDVRLIDFGSATFDHEHHSTIVSTRHYRAPEVILELGWSQPCDVWSIGCILFELYLGITLFQTHDNREHLAMMERILGQIPYRMARKTKTKYFYHGKLDWDEKSSAGRYVRDHCKPLFLCQLSDSEDHCELFSLIKKMLEYEPSSRITLGEALHHPFFDRLPPHHRVGEVSNKQPLSSGSSSRERSHSLSR

SEQ ID NO: 136 - DNA, 2964 bp, Drosophila melanogaster
tttataaagcgtcgtaccgtcgattgttgttgttatcgtagtatgtgttggacccgcgcccctgcctcccgaacgagaggaggcactaacgcagctgcccctgaggaccgtaccctaggagcgggcacgggaggtctcgtagaagtagcaggcggaggaggcggcgtgtctcacgaaccctagttaactgccgctcacggaggttgttgtacagtggaagtgggtgccgtcctcgcgggtgccagtgccctgggtaagatggtctgttagacccgcatcctcgcccgtcaagtggccaccggtcaacgaggagggggagctgcgggtgcttttgtgtacgcgggagtggcgacctctcgtacccggtatgtggcgttccaggcggttggaaccctgggccacctataccgctcctcgattggcggctcgaccatttggtccctaccgcctttaagaccaggttctcccttttggcgggtatgataaccttgtttcagtggccgcttagcgacaccctctacgggccgtggtctgggaaactaggcgagtggctgggaaacccgtagacggtacgcccgccaggctgcggctagtaggggttatacgtggtcgtcgttgtcgtggtcgtagtagtggacttcgccgccggcagcctactgtacgtgtaggtagggttagtcgtagtatacccgccgcctggaggttacttcttcaaacaagaccggccagggaccctggacctccacacgtggttacggcaataacatctcgctggcggctgtgaagacggcgttggcgtaggactccatctccgaaatgcccgtcggaagtggtacttcgacgacttttggatgcttctagacacgtacgcctctcttttatatttccgtgggtctctaaggaagttggcgaccgactaccttgcgttccactatctgtggccgacgctgggcgacgacgggtcgtcaacgtacggcctctagaggtcgaggtacatggcgctctagtacagcctatatggatagttctatcacttcgggttcaagtgtcccctacggtccttcgtcgaaagggcgatgcgtctccggcgattcgtctattatcttagggctaggcgcggccgccttaggttcttccagcagttcaccttacacctcctgtgtaaagttaccgactccgcatggcacccgcgctcgatgctcctaaaagtcctggcaaaccgggtagaatttgccgttacactcggtgtaaaccaactctggcagttctcaagacacctttggaacacgcacttttagatagtgaacagccgactagtacgggcgttctaggcactcgcggtaagcgtcgacgagttcctcgtgccttatggccttgggtgcggaggaggcggcggcggtgtagatttctttcacaccacgatagggtatgtcaaacggcagggtagcggagcctacggctgctagctcatgaatgtcctagcgctggtgtactagtagttcatgtgcgggcggtgctagttggtcggtctacgagtcatgtagttggaatggatagatgtcttcgaccttgtcgacatggcggtgttgacaaagctgctgttcttcaagctagacaagtaaccggcccataccacagacgagttctccatggtctggaaggacccgttacgggacttaaggagggtcctccgcctcgaatgggtccgacggaacggtcacggtcacaagctcacggatgtatccgtcaaaccacattcgaagctcacgaagcggagcggtaagttaaggataaaggctgtcatgacgagacgcaaacggctgtgcctacggatgaagccaaggtcccccatacatcggtttatcacttaaaattattcgacttagattcactttacacactggaaatgtccgggaaggagctgaagttcgggcaaaggccaaggaaggttcatttgggaggagtaacgctcctcgactaactccgaagaaacgacgtgtagctgtttgacgagtgcctgtggtacctcggagactccactctaatttgtagccaaactacaacgaatactcatattatgttaaacaagaacaaaatgagtcgaaataacacaaagacggcctcaccttctcgtataggttcgacctgctgtcgtacatgttcgcggcaagttaccaccataacccgtaccgggtgctcatgtctgtgccgatagtcgtgtacaacgttttcattcaatcaatttgaatacgaaaagggtaagtatgaataaattgaggcaattaaaggtccagactacacgactagttcacgtacgtcccgtgtgtccaccacaccaacgttttatcgcggcctatgcgcgctacccctgggttactttaagcgcacctccgtgacgcactccggaagtccggtgttgctctagccctcgcactcgcccgacgtcgacgccgccgtcgtcgaccccattggaggtcggtcgttagcggtagctgcgggggtaggcggcgtaggtgccgaggttgttggttgaggacatgctagtcacctcagttatcgttgtcgagtaggtgtcggtgatgttgctcgtgttcgtcgtcgggcagcgactggtgttgtagcaggagttacagcggtgacaggggcgtgtgcgggtggcccttaggcggcggtgtcaaaggctactggtagtcgttgtggtcgtcatcgtcgttaaaccaccggcggagcgggtgttactcacacgtttcgctaacgagaagcgggaggagcagctgctacagagaaagtggccgaggacgaagcccgccgataggcctacctcactgtagacggtgtcgccgtcgccactcgtaatgccgttgctgatggtgtagccgacgacctcgccctagacgtaaaccggtccggttatcgtagtcatcaaggcgtaggtgcgttcgccagtagttgagtcggcagatc

SEQ ID NO: 137 - protein, 924 aa, Drosophila melanogaster
IFRSMAANNNNSIIHNLGAGTEGLLSSVIASTGTPGMGSSPVPSRASSSSASSAAQSAWDQLTASASNNMSPSPTAGAPTVTGPILPDNLGVGAGSSPVASCSSPSTPTKTHAPSPLESMGHTPQGPPTLGPGGYGEELTAELVNQGWRKFWSKRENRPYYWNKVTGESLWEMPGTRPFDPLTDPLGICHAGGPTPIIPNMHQQQQHQHHHLKRRPSDDMHIHPNQHHMGGGPPMKKFVLAGPWDLEVCTNAVIVERPPTLLPQPHPEVEALRAAFTMKLLKTYEDLCMRRENIKAPRDSFNRWLMERKVIDTGCDPLLPSSCMPEISSSMYREIMSDIPIKIVKPKFTGDARKQLSRYAEAAKQIIESRSAPAESKKVVKWNVEDTFQWLRRTVGASYEDFQDRLAHLKRQCEPHLVETVKSSVETLCVKIYHLSADHARKIRERHSQLLKEHGIPEPTPPPPPPHLKKVWCYPIQFAVPSPRMPTIEYLQDRDHMIIKYTPATINQPDAQYINLTYLQKLEQLYRHNCFDDKKFDLFIGRVWCLLKRYQTFLGNALNSSQEAELTQAALPVPVFECLHRQFGVSFECFASPFNSYFRQYCSAFADTDAYFGSRGPFLDFKPVSGSFQVNPPHCEELIEASLLHIDKLLTDTMEPLSFIVFLPEWKSISKLDDSMYKRRSMVVLGMAHEYRHGYQHMLQKSDVLIKCMQGTQVVWLQNSAGYARWGPNEIRVEALREAFRPQRDRERERAAAAAAAAGVTSSQQSPSTPPSAASTAPTTNSCTISGVNSNSSSTATTTSTSSSPSLTTTSSSMSPLSPHTPTGNPPPQFPMTISNTSSSSNLVAASPTMSVQSDCSSPSSSTMSLSPAPASGGYPDGVTSATAAAVSITATTTTSAAGAGSAFGQANSISSSASTQAVINSAV

SEQ ID NO: 138 - DNA, 3229 bp, Drosophila melanogaster
atgcatcatcaccagaatctcggagacgcggccgccatgaatggaatgatcccgccatacgaagccatggctatgtacgagcagcccaagcccagattcatcttcaagatgccccgcgtggtgcctgaccagaggtccaagttcgatagcgacgagctcttccgccgattgagtagggagagcgaggttcgctacacaggataccgggaacgtgcaatggaggagcgcaggatgcggtttgtcaacgactgccgcaagggctatgcggagatatcgatggtagcttcaggaactaatctgcagctctacttcaacgccaaccacaatccgtacgcccaggagcaggattgcgatttcgagcgggagcggggcaaagttcatttgcgttctagtttcatcatgaacggggtgtgcgtccgcttccggggctgggtggatctggaccgactggatggcgctgcctgcctggagttcgatgaacaacgagcccagcaggaggatgctcagctgcaggagcagattcaaagctacaaccagcgcatggctgagtccaggagaatctaccacacgccccagactccacccgaggatcaccatcacagaggtgggcctggtctgcctagaggaccaatgggatggtagtgctatatattaccctcatagctttaagtaacatctaagtaaatcaacaataaatatctgaaacccattgatcgtgctcttataatactgagattatgtttaatacactaatggtaatatctgctctcaattactaaaactctcatttcacaaggagtttccgagttttgtgtgtcattcatttggcgaaagccactcatgttcacctaatgattgtttatctgggcctccttaagggttgctagccggggtctttggcctcatttgcgccactttcggaacaaccaccacccgagccgactgcccgaggatggtgaagtgggtccagctgccgttccgccattccgccgtgctctccactctccggggtgggcctgtcgcggctgtggctgcggctgtcctctcttgactctcgatgcggccagagcaccggtcccgtgagcacgtattgattttccgccattccgtttgggatgctgccgaaataaactttgcaactgctctgaatgtgaatctgaatccgaatccgagtcagtctctttccgaactgaaagcggaaaggcgtcgagtgaaaatggaataggtgaagggaacgccgccgcggactaaaaattcataaacttatacataccgcagcgatttgaaaacttgaaaacattcggattgtgtgcctcaatttgctggtggtcgcgtatttttccgcatcgtccgaatcggcacgaaaagctaagagattcgtctaaaattagcgaccggtgtgttttggtagggtgttgtattggctaggggctcccagtgaactccgcccctccgagtatttacccataaccgggccaagatgcctcctgcatccaatacgatcgtgctgaagagcctctccgtgctgctgggcctcttcttcatcttcgtgggcaccctcaagctgacgccgcacattagcaaggatctctacaaggacctggtgagtggaaaatcgatagcgccagagttttaggccttttgtcctggggtacagcccatcgatttttcccacgccccttcgaatctggccttttgaaaactatgtgctcgcccatgggaacgttcttatgtaaatgggcggagacagatttcaagaggcgtcccattatagaacgccattcggaaatatgactgactaatgggcattgaactcgaccccatcaatgccaatcgctgacattcggacatcgcgacgcgctatgatcttcaaaaatatatttcaggaaaaatatatgcttcaatatcgaaatagtctcccaacgaaattccgaaaatttggatttcaaatgattgaggaagcacttttgagctttagctttgcaattatccaaatagattgtgattcatacaaattggacaaacattaatttttcaattttttttgatgaaacttgtgaacaagtaatcttaagactaagatctgaaagagagagaaacctcgaaaatttggcaaactaattattaatcaccttgtttgtaaattgttttgaaaacctccaaacaaattcgaaactaatgatatatagaacagctgttgctctgaattttttgtttacctcttgtaaaaataacgcccagagattttcgttttcattaccataaaaataattcgcataccaaagtaaacatttgcgaacacaagaaccacaatgacgtgttcttttcactcaattcagagtatacaaattggttttatatacataaacaatagggtggcctgagggattattcaaaaaactttatagttttagagataaaagtaaataaataaccaactagatcatccaaaagacacttcagttcaatactttcgaaaaaaatcagtattcagatggcgttttcgaattggcattgcattcgttacgcgccatttcactttcaattttgaagatttctcaatctcgtttttcccgaaggcatggcatttgtatttcggtgtaattacccccgtattaccacaaacactcggggccaacgatgccaacagaaacagatgagtgtgacaacaggggaagcttgcttccatttaaaaataaacccgctgcactgcctcttccgctgggccgccaggcggagcacattcctctgcgggtgtttctgggcatgattaattatatcctcgtattcgatttcctctcgatttcagcgcacagagtacgtgaagtatgccaaagtgttcccactaacggcgctcttcggagtgaagataccctcgaaatggtaccgccgcaccgttggcatcctggagatcgtctgcggcctggccatggcgctgattccctatcgtaagtgtatggacttattaatacggcgcatcagtcggagtaatcactacttacccacagataaggtcaaaaacacggccaacgttacgctgctggtgttgatgctcctgggcatctaccagcactggatggtcagtgatccgttcgagcgctccggtccggcgctggtcttcaccttcatgctgggcggacgcctggtggtctggtaccagaccgcccgcctccaggacgaggccacgacggcagcgcagcctgctgcgaacggcgtaaagcaggactag

SEQ ID NO: 139 - protein, 448 aa, Drosophila melanogaster
MHHHQNLGDAAAMNGMIPPYEAMAMYEQPKPRFIFKMPRVVPDQRSKFDSDELFRRLSRESEVRYTGYRERAMEERRMRFVNDCRKGYAEISMVASGTNLQLYFNANHNPYAQEQDCDFERERGKVHLRSSFIMNGVCVRFRGWVDLDRLDGAACLEFDEQRAQQEDAQLQEQIQSYNQRMAESRRIYHTPQTPPEDHHHRGLLAGVFGLICATFGTTTTRADCPRMVKWVQLPFRHSAVLSTLREHRSREHVLIFRHSVWDAAEINFATALNVNLNPNPIFTHNRAKMPPASNTIVLKSLSVLLGLFFIFVGTLKLTPHISKDLYKDLRTEYVKYAKVFPLTALFGVKIPSKWYRRTVGILEIVCGLAMALIPYHKVKNTANVTLLVLMLLGIYQHWMVSDPFERSGPALVFTFMLGGRLVVWYQTARLQDEATTAAQPAANGVKQD

SEQ ID NO: 140 - DNA, 1419 bp, Drosophila melanogaster
tacagcgaacaacgaatacgacggtcaagactacttctaagcctcttgcttctccttttaagacatggtgttcaccttcattattttggggttcggttcggctcgtgtggttcacttcgcatagatcgagcccttagttggtcaccagtgtaatcactacttctactgctgatgcaaggggtccttcacagggaagtcctcaatttcggcgggttgccttctgacgataatcggaatgggtttggttttcagtgacgagggcgattcctagaccttttactcctacacctgttggtccaatgaaggcggaaacggttggacgggtacggtgcttgtcgtcgctttccttttcggtaacatctcctctttctgctactcaaagacgtgtttttccgcgacgggcatctttatctctttggaggtggcggcggtcagttcccttttcatttttagtcgtaaggaagtgattctctaaagagtctacatctggtcctctttcgactgtcccgattcttgtttcaactattcgggttacatgggttccctagccctaacaactcagacgacggggttcgtttcagcctcgcgttgaagaggttcttgagaagtaggcgccatcggatgggtagtcggtcgtgatgagaacgaaggtcagattcgttattaggacgcgtcggagctcgtcgtggtcgaaaacaagggctatgtcaattcgtcgctgctcgacgtgtgttgtggcttccgcatctaccgggattccggcccgtgttcttcttaggactctgttttctgcgaaacttcagttgttttaggtttggatattcatttgggtgaagcgaccatttacggtcgctatcacttctactactgcttctaccgtgacctctgaaaaagagggacttaaggctcgttttcgacggactccactcgtcgttgctctaatcgcgagatcaccggttcgctcgccggttctaccaccttcggtcatcgttcatggatctcctccatcggctcttccttcgtcggcttcgtcttcggcgggctgaagtccttctcgtcagagtctaacgtgttttcgcgatggtactcgttgtcaatttgcgtctccggtacctgcgtaaccacccgtttttacggttcgcggccgccttcctccggttcctctacgtccactagctgtatagacccagagtccacgatggactagcgctccttacctacgctagccgagaccgaagcaggtggtggaaggttggctggccgcacgactgcctgctcctcggccaccgtccctgagccgcgttcgtggtctagtggatggaccgcgtgttccgcttccggttgcttcggctcgacgtccggtacaccagccggttggccgtctgggcagcccggtgggtttcgtttatgccgaaaact

SEQ ID NO: 141 - protein, 472 aa, Drosophila melanogaster
MSLVAYAASSDEDSENEEENSVPQVEVIKPQAKPSTPSEAYLARESTSGHISDEDDDYVPQEVSLQELKPPNGRLLLALPKPKVTAPAKDLENEDVDNQVTSAFANLPMPRTAAKGKAIVEEKDDEFLHKKALPVEIEKPPPPPVKGKVKISIPSLRDFSDVDQEKADRAKNKVDKPNVPKGSGLLSLLPQAKSERNFSKNSSSAVAYPSASTTLASSLSNNPAQPRAAPAFVPDTVKQRRAAHNTEGVDGPKAGHKKNPETKDALKSTKSKPISKPTSLVNASDSEDDDEDGTGDFFSLNSEQKLPEVSSNEISALVAKRAAKMVEASSKYLEEVAEKEAAEAEAARLQEEQSQIAQKRYHEQQLNAEAMDALVGKNAKRRRKEAKEMQVIDISGSQVLPDREEWMRSALASSTTFQPTGVLTDEEPVAGTRRKHQITYLAHKAKANEAELQAMWSANRQTRRATQSKYGF

SEQ ID NO: 142 - DNA, 6665 bp, Drosophila melanogaster
ccaaaagcaccagcagaagcccgctctgatcaagagtcacacctgcgcctatcagctgcaggatctgacaggatataatcgcgccctgatgcctccgctggataacacggactttagcaatgcctggcggcaggtgaacaacaaccaccaccagccaatcctgcgcctaccaccagcagcggcagcagcagcagcagcagcaggatgcaaaggattccaagaggcactatcaccatcacacctgtccaagacagcggaaaaagtccatgaccccggtggagccaacgcatttgtgtcaaaagcaccaggaagccaagcagcggcgatctagatccgcatctgccaagccgcgcaggaacagttcgtatcactcctatgacgacttggatgtctcatccgcggtactcaatgcggagcgaaaggtggtggccagtttaaagtatctatgcgcctgcacgggagccactttgaggaatctctccaagaaaaccaaggatctgcatgccaaaaactatacctacacgaaggtaaatggggcatagtagctgataattgctaattgaattttcagtgatcttttgttgaaagttgtattatttaaaaatagactgacaaaatatattatatctataatagtatatttatatagtatataaaaatgaattgagactagcttaatcattcgaaaattagttggcacattaaatttaaacggtatggagtgataattcaaataaacttttttgttcatgccatttttgaatcatgttttgcttcactttgtctgtatttagtatgagacagtcgttgagttacagacacctgagtcacatccggcttaattatgtttactcaattgattgcctaattggcactaattaattgctcgagttgcacgcaagaatttaaggcgctgagctgaggcaatagacaaataattgaagcgaaattgtcgtggcaattgttcatttgctctttctcaaaataatagacatctcggagtgtggtttagaaaatacgctagttgcaacttaattaaattagtttaaatacaaagccaaagtgtttgatagcacgagaaatcacttggttctcgacgaacttgaacttggtgataataatagattagtgaaattcacaggcggaagtggatgaatgaaattgtcaccaagcaacatttaatcgtactttcagaggaaatttccgtaaaacgtagtctatcttagtttagtgtttgaatttaatatgctgatgcaccataataattggtagtattgagtcaaattctcagcttgcaggcaataaatcaatggccattaaaacttgatttactgccgaataaatggctttaaatcattttcaaccagcagtactagtatttcctacacttttgacgcaaatgttgaattgaacttggctgccataatgcgtcattaattaaacagcacagccaaatgatcccagcaaatgaacacggcgcgtataaggcatccatccacagcaaaaaatgccaaataaataacaaataaattaaataaatacgtatacgctactacatatgtttgtacatatgtttgtatgtatgtacaatacatgtgtatttgttttccacaatgcgaatcaagaacagcgggcaaagtttttggcagatgccgctaagaaaaaagtcgctgatcgtgaatcggaattgattaaacgttgccttcacattgtatatgtacatatgtatatatatgcttaatgaatttgggaaggggaagtgtgtgtaaatcagccagccaaaaaataaaacagaaaacagcaattaagcaacaattagataaaaacatatgcaattttgtttcttattttttgttcgcattttcaccaggaagctctagtcaaacatcaattttcccagctgtggctattgaaaagcgtacttactacatgttgtgtttaatgcaaatggatagatagatattaactttgaatgcccttacattgccacatcgtgtcttatatttttgcaaggccatttggaaatgtttcagctgtttccagatccatctcagcgcaacacacaaaatcttatgcacaattacacaaaacatcaacaatttccaccccacttttctgccacttaacgccttgcgcctgaaaaaagtgtgtactcattttgtagagttccatgtttttacgaaatattaaagtacttcaataaaaatttacgaaatgctgcctggctagctaaagtgaactaaacatttaagcaatttgcttcgcctttgttttcgtataatcaaagcgcatgcgggcaattaattggatcaacacgagattcgtgtctgtctgtctaggatggatggatggatggatgaccccttgtgtgtgcccgtgtgtgtagccccctgtttcgtccccaccaccgtcaaatcatgtttatgtttttgcattccaattcggattctcgtttggggtcagctagctggatgttgttgctgttgtcgcattgcagagagaaaaaatatggcatttcttccaaaatatttagcatatttattaccttgcgcttacgaataagtctttataaaacataatatgatataaaatatataaattaagcaattattggatataatgctatcaatatttaccactgaaataaagcaggttcgaagttctattgcagtaagatgaactatctgccagtttgtttagaaactatcttccctaactgagcattagaggacccaaaatgactaagaaactttgcatttttttttctccgtgcaggaaaatctttgtatagtgacttgtgttaatccacggctttgttgtaacttttgttgctgtttatttatggggggcgccaccactcacagccgaacttttcgtgcctttccctttgtggttgcttttgctgctcgtttattcattcagttctcgtttaatgctttttcacgcttttggcattgctgcgagtaaatttcaatttaaatacttatgcactcatttatgtgggcccgtcttttgcgtgtggtatttacatagtttttacataaacacaaaaggtattttgtaattagaattttaatgcttcgacgttgattaagcgaaaatatgttgggcattttccggaggcatagggccttgggaaataagtggtaaaaatacgtgaaaaaatgcgtgtgaaactaatcgaaaagacaacttgtctacaaacttcaatgtgcactttatagctgaaatttgaaattgcgcaatttttctttgttttttttttaaattccctgtttcatttccaattaggcgaaacaaatttaaaaatttcccattttcatctctttcgaaacacatttagttttgctctatccaacaaattagcaaagaatttatgtatcaattaaaataccacgaccagacatgaacaaatgttgtttgggcctcaacattgccaaagatgccacacgaaacggaaatggacatggaaatgccagacaaccgagtttccacaaaaacaaatattattctcattcgaaacaatgtgcaaaaatccaatggcttaatgtttatattgggaatatttaaaaattgttgaactcgtatttaaggggaaataaattaaaaatacgtcggatactgaagctatatttagacgaatgatacacttgatcgactataagtaagccgtgatctttgacatagatttaagaaatcatttaattatatatttattgaatacatcaaacgttgtagacctttatttataatttcctcactagatagaaaaatgtaaagccaattttgacgctgtcaaaacaaagtttccacacagagttcacgcgttaagcacttaagtcaaaataaaaagcaatcactgccagcaagactaatccactttcctttttcattaccttgcagcccacgtggcgcctttggggcgaagagcacgagaagaatgcaattttcaccgtttacctgaagaaagtgcgataccaccgaccgacgcccacagccagcaatgtgagtaatcccaaatatcaattacctggacggctgaaatggcttggcagctcaatttgaagatagaaatattgtatctttagctaaaatgttaacgaagcttttaagtaaattgcaattgggcagaaagtgtggggaaaaattgtggtgacataatttcaaacacccgaaaatattttgtatctctagtctaacaaatcttcaaatcgataaaaatacatatatgtatatctaattaaatgttttttttttttaaatttttactcaggactcagatgatgagatttcccatctggagtgggagactgtacgcgtgcgtttcgttaaggcggctacattggctcgattggtggaggcgttagccaccgacgacggcgagctggagtccaccttcatcaacgtgttcctgtccacatatcgcaccttctccacacccaagcaggtgctcagtctgctgacgcaacggtacgatgctctgcatgagaagcacctggaggagttggagcaggcacagcaaaatggacaggtcatggatcccgcctacgatccacacgcctccattcacgagcagcacaagaaaaccctagtctcagcgctgcacgtctggctggatggattcccggaggattggcacgaggataacctgcaacaggtaaggaaataaagtgctaaattgcaaaattcatatttattgatcaaatatgtttatccacagatcttggcatttgccaccaagcggctgaaacgatccgatctgcacatcaaggtgctgaatcgtctggaacggctcatcaaacagtctctctatggaaatggaggaggaagcggtggctcggagaacaatggtcattcgtggctttccgcagcgcgctcacaacagatgcagcaattcatgattcccactcactatggctcttcgtatgacctcacggatcagttcaatggcatgtacctctcgccaatgggccacgggcccatctatcgtggacctacccactttctgcaggcattccgttttccgcatgtgcccgtccggcattttgctgagcagttgacccgtatggatacggaactctttaagcgactgattccccaccagtgcctcggacacacgtgggcacgacgtgatagtggaggatccgagactgtggtggccaccatcaaccagtttaatgcagtgctcttccgggtggtgtccagtatcctgatcgatcgcctgaaacctcaggtgggtgtctctttttatacatgattctctgccgactacagtgtaaattaacgattggattttaattaccaggagcgcgctctgaacatttcacgatggattgatattgcccaagagttgcgcatgctcaaaaactttagttcgctcaaggccatcatttcggctctaaactccaattcaatataccgcctctccaagatctgggaagtgctgcctaaagaaagggtaagttgtgttgtatcatacacattcttaatttgtagactaattatgcttttgctcatagatggaagtctttacggagctggcgaatatttgctcggaggataacaatgcttggactctgcgagaagtgttgaaacgagaaggaacggccaaaaatccagatccaggcagtgatcacagcgataggcatctgcagaagcttattctgaatttgggaacacaaacatcgcatggaacgataccctatttgggtacattccttaccgacctgaccatgatccatacggccaatccggactacctcaccgagaataagctcataaacttcgacaagaagcgcaaggagttcgaagttctggcccagatcaagttacttcagggagcagctaacacatataatctccaggcggatgcgctctttgatcattggttcaactcaatgccagtgtttgatgagcgtgaagcctttgagctgagttgtcgactggaaccaccaccgccggcgccacggaaatcggtggtcagcactaacacctctttaacaaacacgaccgcctcatcgacggcttctattatgggccaccgcaagactgactccatacactcgaattcgagcagcggagcgggatcacagttctactgcgaactaaacagtagtaccagctccagacataactccttggatcgggatgtccaccatcagcacgcctccttgatgtccgcctcgagtagtgtgtccaatctgtcgttggactccagtaactccggcggtcggcagtccggcaagctgacccactctcagtctatgggaaatggtctgaaatctcacggaaatggcactacgaatggtggatcgccccatatcaatgctcagttggtgcaaccatcaagtggaacccctcactctgctcccgatttctatatcattcgggtgacctatgaaacagacaacatcgagctggatgggattgtgctgtacaagagtattatgctgggaaataacgagcgcacgccgcaggttatccgaaatgcgatgcttaaattgggtctggaggatgatccggataggtttactttggcgcaggtcctacccgataaggaactggtgatgccgaagaatgcgaatgtctactacgcggttaacacgaactacaacctcaacttcatcctaagaccgcgaaaggaagagggtgtggcaggaagctag

SEQ ID NO: 143 - protein, 926 aa, Drosophila melanogaster
QKHQQKPALIKSHTCAYQLQDLTGYNRALMPPLDNTDFSNAWRQQRQQQQQQQDAKDSKRHYHHHTCPRQRKKSMTPVEPTHLCQKHQEAKQRRSRSASAKPRRNSSYHSYDDLDVSSAVLNAERKVVASLKYLCACTGATLRNLSKKTKDLHAKNYTYTKPTWRLWGEEHEKNAIFTVYLKKVRYHRPTPTASNDSDDEISHLEWETVRVRFVKAATLARLVEALATDDGELESTFINVFLSTYRTFSTPKQVLSLLTQRYDALHEKHLEELEQAQQNGQVMDPAYDPHASIHEQHKKTLVSALHVWLDGFPEDWHEDNLQQILAFATKRLKRSDLHIKVLNRLERLIKQSLYGNGGGSGGSENNGHSWLSAARSQQMQQFMIPTHYGSSYDLTDQFNGMYLSPMGHGPIYRGPTHFLQAFRFPHVPVRHFAEQLTRMDTELFKRLIPHQCLGHTWARRDSGGSETVVATINQFNAVLFRVVSSILIDRLKPQERALNISRWIDIAQELRMLKNFSSLKAIISALNSNSIYRLSKIWEVLPKERMEVFTELANICSEDNNAWTLREVLKREGTAKNPDPGSDHSDRHLQKLILNLGTQTSHGTIPYLGTFLTDLTMIHTANPDYLTENKLINFDKKRKEFEVLAQIKLLQGAANTYNLQADALFDHWFNSMPVFDEREAFELSCRLEPPPPAPRKSVVSTNTSLTNTTASSTASIMGHRKTDSIHSNSSSGAGSQFYCELNSSTSSRHNSLDRDVHHQHASLMSASSSVSNLSLDSSNSGGRQSGKLTHSQSMGNGLKSHGNGTTNGGSPHINAQLVQPSSGTPHSAPDFYIIRVTYETDNIELDGIVLYKSIMLGNNERTPQVIRNAMLKLGLEDDPDRFTLAQVLPDKELVMPKNANVYYAVNTNYNLNFILRPRKEEGVAGS

SEQ ID NO: 144 - DNA, 1357 bp, Drosophila melanogaster
acagttcgctttcgagttcgctaaaacacaacgtagaaaggccttagctccactgaaaaatcagattaaagctgtcagcagaaggtactggaaagcattcgagaagtcgaaaataatcccaatcaagcccatcaaattgaagcaggcgacgccttctgcgccagtgtgtgtaaaggcagctagattttcaatttcaacgcctatttaacattgtagctcaactcgagtcgcctcattctcatttgtgcatttcaagcaaatcaaactaaagtgaaaaacaaattttggttctgtgattttgtgtgaagactacgttcgacgatcaaagatggtgaaactaattgctagcctgctcctgttggccgtggtggcccaggcctatggagatttcaagtgctccctcgctgttcctgagattaccaaggactgggtggacatgaaggatgcctgcataaagggcatgcgcaatcagatccaggaggagatcaacgcctcctaccagtacttggccatgggcgcctacttctcccgcgacaccgtcaaccgccctggattcgccgagcacttcttcaaggccgccaaggaggaacgtgagcacggatccaagctggtggagtacctgtccatgcgcggtcaactgaccgagggagtcagcgatctgatcaatgtgccgactgtggccaagcaggagtggaccgatggtgccgccgccctgtccgacgccctcgacctggagatcaaggtgaccaagtccatccgcaagctgatccagacctgcgagaacaagccctacaaccactaccacctggtggactacctgaccggtgtctatctggaggagcagctccacggacagcgcgagctcgccggcaagctgaccactctcaagaagatgatggacaccaacggcgaactgggcgagttcctgttcgacaagaccctgtaaggaggtggagatagagaaggcgcagcgcccagtcacgcatcaaaattatcagccagtcgagttatctgttatctgtcagcccagagagccttcccgagggtccgctattaaatcatcactagccaagtcggcgaccggccaataaattatccgttcgactgcgatcctcaaaccagcacagcaaaattccacgtctgttctttcttatcaaccacttgtgatttccgtacacctcgggagggggctccacattatgcaatcgccgagatttcgcctaggcttaagtggaatcgctcattcgcatagtaagacactcagcacaacccattcaatacatcctatatctttatatttttctgtcaattagacgagcaagttcttaaataaataacaatatatatgtaacgatat

SEQ ID NO: 145 - protein, 205 aa, Drosophila melanogaster; identical to SEQ ID NO: 69

SEQ ID NO: 146 - DNA, 1155 bp, Drosophila melanogaster
atggctgctgaggagggaaagtttgacaacatactgctggccgtggccgagaagcatcacggtggcgtgcccgaggtaaaacaataacaaagaacgcaacttctttgtttcaattttgtttaatcatgttgtttgtgttttatatctaagttccttggcactttggccagttttctgcgccgcaagaccgacttcttcacgggagccaagcagacggagtgggagaagctgctgctggatgtcttcaacaaggagtccaagctggccgtaactgaaaactacgaaaagataaaggctcgcgaagcttcccagcgcctaaaggcggagaaggagagagccgaaaggaaggcccgcaagcaggagattgacgataataaaatatgtgatatcactgacgaagaggcagcggccattatcaaggaggaggagaccaagtaagtgcaagcgtaatgagatcatttaccaaaatacccaggtaactcggcaaaagctgtgaaattcctgcaaaatggcaaattagcattccttttcaaagaaagagtttgaaaccgagctcaattcttatcctaaatatgttgtatcattagcattcgtatatcttataatgtctaaatcccatacagaaaacgccagcagctgctggatagcgctggtggagagccatctgcctcgaaccgagatggcatctccaagcccatcgagaaagtggacgatgaatccgataagagtgagctgggtaagctgatgccgaatgcaggcaatggctgcaccttggaaaactacacctggacccaaactctggaggaggtggaggtaagtccgggcacgtcgctaacgccgtatttctcttatttggcccagtgaggtgttgtcatagttatacagtagctagcaattttagaagctcaatctttcaatgcgtaattgatgtccttaattgtgctagtggtttttgagtaccgccagacatagttattatttattaatttacttaaacacttaatcggtgttttcttgcccgaataccttagtcgctggttgctaggcagcggtcatagctgaaagcccaagtcattgaacccacgacaggtgtgattcatcaacccttcgtgtacaattatacaattcgctttattaaacatatcacagggataa

SEQ ID NO: 147 - protein, 184 aa, Drosophila melanogaster
MAAEEGKFDNILLAVAEKHHGGVPEFLGTLASFLRRKTDFFTGAKQTEWEKLLLDVFNKESKLAVTENYEKIKAREASQRLKAEKERAERKARKQEIDDNKICDITDEEAAAIIKEEETKKRQQLLDSAGGEPSASNRDGISKPIEKVDDESDKSELGKLMPNAGNGCTLENYTWTQTLEEVEG

SEQ ID NO: 148 - DNA, 651 bp, Drosophila melanogaster; identical to SEQ ID NO: 90

SEQ ID NO: 149 - protein, 216 aa, Drosophila melanogaster; identical to SEQ ID NO: 91

SEQ ID NO: 150 - DNA, 1017 bp, Drosophila melanogaster
acggggttaatttcaagcagacattttcccaacatggtttacatacacttccccaacaatttaaccgaagaggagcaaatgctgcaggccaagtatcagaaactcaagaaaaagaaaaaggcactgcaagcgcacaaggcgcccaagccggagccggagagctccttgaccttgaagcgtcccacggatgcgcgagatgcccgtgaagtggccaggaaactaatcaaaagcggcgccattcccgccatccagaagcagaccaagcaagatcagacctccttcaagcggcccaaagggcaggaaagagccaagcgctccacctcggagactactgttgcctcctaccagcccttttcgtctacacagaacgacgtggcccaggagacgatcattagcgagatcattaaggaggaaccgcgccggcagaatctctaccaacacttcgccaccgagcgggatcgggaggagcgcggcatgcccgagaaggtgcccatggacacagcgcagccagagaagccacgggccggcaataccatcttcgtgtccggcaacaaggtcaccgaggatttcttaaaaaagacattcaacgactacggcaccattgtcaatgtctccatggagatcgaaaagagtcgcggttttgtttccttcgccaaacccgagtcggcagatcgcgccattgcggagattcatggcaagaatgtgaatggcatcaacttgcaggtgcagttggctagacgccagccccagattgagcccattaacgatgcctcctcgtcggcagtctggtcatctattgccgccagcaaatcacaaaagggtagccacaaggaccaccgcgagatggttcaatacgatgaagacttcttgctctaaagcgcaatacttagtttctaggtttagctttcttcttactttatcccttagtaacataacacatttcattttattttaaatcattttgctttattgaaaatacgcttctatatatttatgtatatatgttcactttctggc

SEQ ID NO: 151 - protein, 280 aa, Drosophila melanogaster
MVYIHFPNNLTEEEQMLQAKYQKLKKKKKALQAHKAPKPEPESSLTLKRPTDARDAREVARKLIKSGAIPAIQKQTKQDQTSFKRPKGQERAKRSTSETTVASYQPFSSTQNDVAQETIISEIIKEEPRRQNLYQHFATERDREERGMPEKVPMDTAQPEKPRAGNTIFVSGNKVTEDFLKKTFNDYGTIVNVSMEIEKSRGFVSFAKPESADRAIAEIHGKNVNGINLQVQLARRQPQIEPINDASSSAVWSSIAASKSQKGSHKDHREMVQYDEDFLL

SEQ ID NO: 152 - DNA, 1707 bp, Drosophila melanogaster
ttttattcgcgtttgatatatatactctggggattttcacatatatttatatatgtatatatcgatattggtagttttatgtacggatctatgggttttttcgcctgttcagttgggtttcgcaaatcaaataatttgtatcacaattttctttttgggttgtttttctttgtttcggtttttttttctcgggatatatcctcactttgatgcttctgcgaggatgaacaaatgcaagttaaatcataggttgcgtttggtcattagcacttcgttttgtcttttatgcaacattaaaaacaaacacacaaatacacacatatgcataatccgagagttgaaagttcttgcaatgcggcaagagttggccataatcaaataaacctgttggctaagacaagaacgcagcagcagcaacagcagcagcagcagctgatttatgttgccgagctgggagatatatgtacattgtacacatatagaaatatgtatatttatagagctagcgttttgttaaccggttctcagcgcctgggtctcggattcttggtccgacagccaaaagtcttggactcggccaacaattgatacaatttgcgggataattttctgctggcgttgccgacttctttgattttcatggccgttagcgggcgtgtgtgtgggaaattcctcccagctgccgccagcaaccggactttggggcctggtgcctggggccacttgcataatgagtgcaacagcgcaagaacggcaagaacagtgcaagtcaacgactttcacacgcccaaaaactaaaaaaaaaaaacaactaaaaaccaaaaaccaaagccaaagactgcgagcctaatgaggggaaaggcatcagtgcgagagttgaaaaggtcagcggcaccagtggttggaattggggaagaacggcacagaatttacactgagaaaaaaataaggaagtattctaaataaaatggtaaagttcttcgcttttaacacaaaatgcttttattctaaaattactagccaaaacaaacaaacaaaataatgagccgaagaggaggatttctacatttcggttacaactatttgccccagtgcatccgctgaccaagtccaactctagtgcgatcccatgtccgcattgcctcagcggaaataatcgtaaaataaggtaccaccgagggcaccaacagacacataaagacaaaagccaggttcagctggccaagaagtggaggagcgagaagaagctgaagcggctagtggtgctaccaagaatatggaggagaaaagaagagtataagcagaagcacaagcaggacagaagtatcgggcaatgggcatgaaataaaagtttagcgcaaagcggaattgaaatggatggctggccaagaactagactctctctctcgccgcgactgttgactgttgtcgactgctgtttgaacttggctaaaataaataaagccatacaacagaccaactggggacccaaactccagctcccatcccccataccccgtcccgcagatgttcccttagttttgggtgtcagaaaagttttgtcgctggcaaagttaacatttcgcaccccaaatgaaaatgaaatagttttcttttcgctcgcaactttgcagatatagcagttactttttactttgcctgatgtattggattcataattaaatttgctgctaattgtgcggcgct

SEQ ID NO: 153 - protein, 157 aa, Drosophila melanogaster
  MISC_FEATURE (1)..(157): Xaa = any amino acid
XRRTISSKFNYESNTSGKVKSNCYICKVASEKKTISFSFGVRNVNFASDKTFLTPKTKGTSAGRVFGRVKVVDLHCSCRSCAVALIMQVAPGTRPQSPVAGGSWEEFPTHTPANGHENQRSRQRQQKIIPQIVSIVGRVQDFWLSDQESETQALRTG

SEQ ID NO: 154 - DNA, 1762 bp, Drosophila melanogaster
cattagaattgtgtgatatattccacagaccagatcattggaagagaagtcaatcgtgcgtgagagaagccagaagagaagccacccgcgacattccgaagtaaccatttctgtagggtcagacgtacatacaaacaacattcatataaattgctcgtgctgttcattggttaccgcctttagtcgctacctcgctcgcacacgcgctcaacacctacccttacccgtcaaaaatgccgaccttcttcttgccacgcccgtaaagatggctcctaagaagcatagtgggtttatgatgttcgtaaacgagtggagaaaccggaacgccgagggccgacgcatgacgctggcgcaggctgtttcccactgcggcaccatatgggagaaaatgaacacccagcagcgtggtccgtacaactcaggcggcaaggacgcaaatgtggcgcaacgcgccaaaagggaaagttccaacggccacggccaggtggacaaggcccaaagggaggccaccgagagcttgatggacatgaaacgtaccatcgagcgcctcgtgctaaacgccaagatgtcccatgatctggagaatgccaagtttgtcttcgttgccttcaactacttcactaaagccttgaccaccgacgtctatgtgcccgccgagtttgcggcatgcgaatattcgttgaaggagggaatccgatccatctacagcaccatgattgaccccggtcagatcatttttgggcaaggtagcgatgccctgcttcactcttcaaccactcacgacctgccgctgccgcccaacgcgctgggggagaagaacatgaccaagctgtaccgcaacattgttgactacttatccaaatgccagggaaaaggcaagaccctagtagtctttacacccgccgaaaatattaccatggtgaagtcatgcttccgctatttggagtgcgatgatgacttcagggacgggggcgaaaaaatccaggtgtttgatatccagtacttcctattcatattgaagaaggaggtcatgaatgtcgctgatttgaatgacgagaaaatcaacaaattcgcgacggatgctttttttaagaaagactttttcgagtttaccgcagggattgcgtgtcagtaccacgaggataatgatcgaaccaagtactgtacccagagtatggtgactagatgggcgtataccttcactgattttatgtgcggagacctggccataaccgtccaacccggaaagcacatacctgcccaaacaaaacccaactaccttatcataagctcgtacgcctcctcactcgaccacgagtcctccttcgactctttttattcgcttcccggatctggggtcaagaaggaaagccaacccgaagcttgttcgctttctagcagtcgactttccgtcgcatcaagctcctacaagcccatagaccacacttcctttgccgcaaatttaaacgaagtttctgaattccccagcctcggcatgcgtaattctagtaagcatcacggtatcgccgctagtgctcagcgggaatggaacgctaggaacttaccgacgcactcgcgtttaattcggaaggtttcagacaacgacttctccgtaaacggcgctgatgggaaacttaaaaaataagccgctttggtctatcaattggactaagaaacaatgattccttatagataattttcttatcgcattaaactgtacaaatactattacttgtatttaaaaataaattcgttcaaacgg

SEQ ID NO: 155 - protein, 459 aa, Drosophila melanogaster
MAPKKHSGFMMFVNEWRNRNAEGRRMTLAQAVSHCGTIWEKMNTQQRGPYNSGGKDANVAQRAKRESSNGHGQVDKAQREATESLMDMKRTIERLVLNAKMSHDLENAKFVFVAFNYFTKALTTDVYVPAEFAACEYSLKEGIRSIYSTMIDPGQIIFGQGSDALLHSSTTHDLPLPPNALGEKNMTKLYRNIVDYLSKCQGKGKTLVVFTPAENITMVKSCFRYLECDDDFRDGGEKIQVFDIQYFLFILKKEVMNVADLNDEKINKFATDAFFKKDFFEFTAGIACQYHEDNDRTKYCTQSMVTRWAYTFTDFMCGDLAITVQPGKHIPAQTKPNYLIISSYASSLDHESSFDSFYSLPGSGVKKESQPEACSLSSSRLSVASSSYKPIDHTSFAANLNEVSEFPSLGMRNSSKHHGIAASAQREWNARNLPTHSRLIRKVSDNDFSVNGADGKLKK

SEQ ID NO: 156 - DNA, 2657 bp, Drosophila melanogaster
gaatcgaacctaaagacgtgctcgcactaaaatcgcttgaaaacaggcccgcagacctgcgaaaaacgaaaaagtgcagcgcgcatatactttttcaactgtgcccctctagcttaaaattaagtcgcggcgaaaagtcgagtaaaaaccgcggaaatgcgcatgcaaacggtgtgtggccagcaaaatcgctgccaaggcaccgcacacacactcggccacccacacatacacacttagtgctgtactcgaaaagtgcgaagacaacaggaactctgtgccaaaataatattaacagtacccagttattccattccactgcacctgtccccgaaacatcgaaatattcgcgttacgtatacgcaacgagtgctgtaaacaagtttgcacaggcgataacaatgtccaaatacgatctgctttatctaacggcgcacgtaacgctggtctgctgtctgattggaatccatggatctattttgcccggaagtcatgggatcatagaatgcgagcacttcgacgagaagatgtgcaacacaacgcagcaatgtgaaacacggatagagcactgtaagatggaggcggataagtttcccagctgctatgtcctttggtcggtcaacgagacaacgggcatcctgcgcatcaagatgaagggctgcttcacggacatgcacgaatgcaatcagacggagtgcgtgaccagtgcagagccacggcagggaaacattcacttctgctgctgcaagggatcgcggtgcaattccaaccagaaatatattaaaagcaccacggaggcaaccacacaagtgcccaaggagaagacgcaggacggcagcaatttgatatacatctacattggcacctccgttttcagcgtgctcatggtcattgttggcatgggccttcttctctaccgacgccgcaagcaggcgcactttaacgagatacccacgcacgaggctgagataacaaactcatcgccattgctcagcaaccgtcccattcagctgctggaacagaaggccagtggtagattcggtgatgtgtggcaagccaagctcaacaatcaggatgtggccgtcaagatctttcgcatgcaggaaaaagaatcgtggaccacggagcacgatatctacaagctgccgcgcatgcgccatccgaacatcctcgaattcctgggcgttgagaagcacatggacaagccggaatattggctgatatccacctaccagcataacggatcactatgcgactacctcaaatcgcacacgatctcatggccagagttgtgccgcatcgctgagtccatggccaatggactggcacatctgcacgaggagatcccggcatcaaagaccgatgggctaaaaccatcgatagctcaccgagacttcaagtctaagaacgtactgcttaagagcgatctgacggcctgtatagctgactttggtttggccatgatattccagccaggcaagccctgcggcgatacacacggtcaagtaggcactcgacgttacatggccccagaggtgcttgagggtgccatcaatttcaatagagacgctttcttacgcatagacgtctacgcatgcggcctagtcctctgggaaatggtgtcacggtgtgactttgccggacccgtcggtgagttccagctgccttttgaggccgagctgggcctgaggccgtcgctggacgaagttcaggagagtgtggtaatgaagaagctgcgccctcgtttgctcaactcctggcgcgcccatccgggacttaatgtattctgcgacacaatggaggagtgctgggatcacgacgctgaggctcgtcttagctcttcgtgtgtaatggaacgctttgcgcagctaaacaagtatccctcaacccagttgctgatcaaaaaccacaccaacattgacgacgccaaggaatctacgaattgcttatagaagcggtactaagccacagaccagccagcggatctgtggctctgcaaaaaaatcagttgaagctttttgcttcgtagtggatagttgatcgtcgaggtcgtaagacgtttcgtttgtagtttaatagtttgtagtaccattataagcagctacagaatgggttgatttatacgaaagaagtcgtgtaaggtgtaacttttcctaagggaaaagctaaaagcttaacatgccaacgattttttgttattattttctttaaattataaatcgactcattcgatgttaacccgagatcttaaatctgttggaaataagtggaaacgtacactaagcaactttgaacaaagagcattagctatgtccagagacgtggtagttgctaatccgacattgacttcattgactgataaccatatatagttctatataaatcatgcatataacgtacaatttgttttgccctctggcagtagtctgtgtgcatatgtaaactgttgaaaattatcgtcaagccttttaaagtataattttatttgtacgttatcgaatgtcttcatatagtagtagttttatatttaaagttattttcaaaatagatttaacaattttagtttactttttagttgtaacgtttttatttcgcgctcaaacgtgcatgcgttttaatgttgtattttaaataaaaaatactttaaactccatcct

SEQ ID NO: 157 - protein, 516 aa, Drosophila melanogaster
MSKYDLLYLTAHVTLVCCLIGIHGSILPGSHGIIECEHFDEKMCNTTQQCETRIEHCKMEADKFPSCYVLWSVNETTGILRIKMKGCFTDMHECNQTECVTSAEPRQGNIHFCCCKGSRCNSNQKYIKSTTEATTQVPKEKTQDGSNLIYIYIGTSVFSVLMVIVGMGLLLYRRRKQAHFNEIPTHEAEITNSSPLLSNRPIQLLEQKASGRFGDVWQAKLNNQDVAVKIFRMQEKESWTTEHDIYKLPRMRHPNILEFLGVEKHMDKPEYWLISTYQHNGSLCDYLKSHTISWPELCRIAESMANGLAHLHEEIPASKTDGLKPSIAHRDFKSKNVLLKSDLTACIADFGLAMIFQPGKPCGDTHGQVGTRRYMAPEVLEGAINFNRDAFLRIDVYACGLVLWEMVSRCDFAGPVGEFQLPFEAELGLRPSLDEVQESVVMKKLRPRLLNSWRAHPGLNVFCDTMEECWDHDAEARLSSSCVMERFAQLNKYPSTQLLIKNHTNIDDAKESTNCL

SEQ ID NO: 158 - DNA, 548 bp, Drosophila melanogaster
aattttctggagatttcttgaaccaactttacgaagcaactgagaaatgactggtcgtggaaagggtggcaaaggattgggaaaggggggcgccaagcgtcatcgtaaggtgcttcgtgataacatccagggtatcaccaagcctgctattcgccgtttggctcgtcgcggcggtgttaagcgtatctctggcttgatttacgaggaaactcgcggtgtgctaaaggtattccttgagaacgttatccgtgacgctgtcacctacaccgagcacgccaagcgcaagaccgtgaccgccatggacgtggtctatgccctcaagcgccagggacgcaccctttacggatttggcggttaagcacgccctctaacctccacttgataaataaccatggagttaacttaactacattcaaaatacttgatccaattgaatcttaatcagtagtattcaacgcaaacttaaccgaacgcaaatattttataatttcacaatatacggactaaataaatcaaaagatatcacatagagaactcaatatcatgca

SEQ ID NO: 159 - protein, 103 aa, Drosophila melanogaster; identical to SEQ ID NO: 81

SEQ ID NO: 160 - DNA, 1831 bp, Drosophila melanogaster
gcagtggcgtcgtggaggaggagtagaaaggggatttttgcgaaaaatcccaacttgaagagaattttccccgtaaccgttaaacattaaatcgtcgtgttggagaaaaatagcagcgaatacgctagcaacgctggggaggaacaacaattgttggatttggacgcgaccgctttgatgtcgctgccaatgaattcgctgtattcgctcacctggggcgattacggcaccagcctcgtatcggcaatccaattgttgcgctgccatggcgacctcgtcgattgcacgttggccgccggcgggcggagttttcccgcccacaagatagtcctgtgcgccgcctccccctttctgctggacttgctaaagaatacaccatgcaagcatccagtggttatgttggctggcgtcaatgcgaacgatctggaggcgctgctggagtttgtgtaccgcggagaggtgagcgtggatcacgcccagctgccgtcgctactgcaggctgcccagtgcctgaacatccagggactggcaccgcagacggttaccaaggacgactacaccacgcactcgatacaactgcagcacatgattccacaacatcacgaccaagaccaactgattgccacgatcgccacggctccacagcaaacggttcatgcccaggtggtggaggacatccatcatcagggccagattctccaggcaacgacccagaccaacgcagcaggacaacagcagaccattgtgacaaccgacgcggctaaacatgaccaggcagtgattcaggcttttcttccggcacgcaaacgcaaaccacgcgtaaagaaaatgtcacctacggcaccgaaaataagcaaagttgaaggaatggatacgattatgggcacaccgacctcttcacacggctctggatccgtgcagcaggtgcttggcgaaaatggagccgagggccaactgctatcatccacaccgatcatcaagagcgaaggacaaaaggtagagactattctcaccatggaccccaacaacatgataccggtaacgtcggctaatgcggcaactggcgagataacaccagcacaaggagccactggctcatctggcggcaatacaagcggcgtcctatccacgccaaaggcaaaacgcgctaaacatccgcccggaacagagaaaccacgttcacgatcacaatctgaacaacctgctacttgccccatttgctatgctgtcattcgtcaatcccggaacctgcggcgccatctcgagctgcggcattttgccaaacccggcgtgaagaaggagaagaaaagtaagtccggtaacgatacaaccctagactccagcatggagatgaacaccacggcagagggcgacaacacagtgggcagtgatggagcaggcggagcaggatcagcaggaggacaatcatctggtacgacgccaacgagagtgatatcgaatgcaccgcaggccgcgggggcgccggccatcctggcccaaggtgtgctgccccagcagcagcaacagcagcaactgcagcagcaacaccagcagcacttgacagcaacattagcgggtggtggacaggcatacatcaaacatgagggcggcggcgggggcggcactgggcagcagcagcaacagcaagcggcacaacagcagggcatgcagaacgtcatacacattgtgggcgatcaggtcttcataccgcagcagcaacagccgcagccgcagtagccacctccagccgagccttcaatcattccaacgcaccaacgacaccatcatccacatttccaaaaaaacattaaaaaaaaaaaaaaaggaattc

SEQ ID NO: 161 - protein, 519 aa, Drosophila melanogaster
MSLPMNSLYSLTWGDYGTSLVSAIQLLRCHGDLVDCTLAAGGRSFPAHKIVLCAASPFLLDLLKNTPCKHPVVMLAGVNANDLEALLEFVYRGEVSVDHAQLPSLLQAAQCLNIQGLAPQTVTKDDYTTHSIQLQHMIPQHHDQDQLIATIATAPQQTVHAQVVEDIHHQGQILQATTQTNAAGQQQTIVTTDAAKHDQAVIQAFLPARKRKPRVKKMSPTAPKISKVEGMDTIMGTPTSSHGSGSVQQVLGENGAEGQLLSSTPIIKSEGQKVETILTMDPNNMIPVTSANAATGEITPAQGATGSSGGNTSGVLSTPKAKRAKHPPGTEKPRSRSQSEQPATCPICYAVIRQSRNLRRHLELRHFAKPGVKKEKKSKSGNDTTLDSSMEMNTTAEGDNTVGSDGAGGAGSAGGQSSGTTPTRVISNAPQAAGAPAILAQGVLPQQQQQQQLQQQHQQHLTATLAGGGQAYIKHEGGGGGGTGQQQQQQAAQQQGMQNVIHIVGDQVFIPQQQQPQPQ

SEQ ID NO: 162 - DNA, 1962 bp, Drosophila melanogaster; identical to SEQ ID NO: 98

SEQ ID NO: 163 - protein, 599 aa, Drosophila melanogaster; identical to SEQ ID NO: 99

SEQ ID NO: 164 - DNA, 2255 bp, Drosophila melanogaster
taacccagtaggactactgtaaaaacgacgtatttccaggctattgccgagtcattgaaacataaaataaaaaaggatgattatgatttcaaggatatattacgatagacagctctgcaaaacggcgccacttggcaatgtgcggccacaaaaggaagctaccatctaggggtgagggcatatcgattggccaaacatcgatatattccgttccacccctggcgttccgctgacggcgtcttttccccgaaaaaatttcaagtagtcgaaaccgaattccgtagaaacaactcgcacgctccggtttcgtgttgcaacaaaataggcattcccatcgcggcagttagaatcaccgagtgcccagagtcacgttcgtaagcaggcgcagtttacaggcagcagaaaaatcgattgaagagaaatggtaatattgcggtgaatttttgagcggcagcgcatctcgcttttcccactagcgctgcccccgcgaattaaatattgaagtgcggggattacggagacgcggacaacaaatgcacgcaaatggacaccacgtaggccgcaacaacaaggagcagcgaaatcggcgggcattgttattgtgctgctagcgggcaatcggccgtaacctcactttgggcagcggtgcctccattttgtgttttcttctgcgactcgtgccacattcgctttaattcgttattttaagaaatgcattgtgctgtgtctattcgcaggctggcggtaaagcaggcaaggattcgggcaaggccaaggcgaaggcggtatcgcgttccgcgcgcgcgggtcttcaggtgagttttacaatctgtacctcggttttggcgccttttcggtacccactctgccaacgagcatattccacacataacagggtggcccgccttcgttggttggttggggttgacaaaaacataacaagccagccggtcaagccaattaaccagttacctgcctcttatagtcccggacagttccccgtgggtcgcatccatcgtcatctcaagagccgcactacgtcacatggacgcgtcggagccactgcagccgtgtactccgctgccatattggaatacctgaccgccgaggtaagtgtgcttccgccgagttttcccgcttttctctcgtggtactttttctcgcttcaatgtaaacagcatttaccagaaatattcaagggaaacatttttttttccacagttgcattctctccacttttcttattgtgtacagttatttcgaatttccccgttccaattcaaaaacacactttcttattgacatttcgtgtggaatgagaatgatgaaaatgtacatctaattcatgaaatgctcgaggcgcacattatcagttgtttaaatctaaataacagtagtttcgatttaatgtataacgctttaattttctagatatacagtttatagagtttgcgccattagcagtacactttccgcttttccgaatataacgttacgtgagttttgttttaatgtgtgatgttattaaagaaatttattaaaagattcaaagtttgttttggtaatgagcgatacaagtaaataaattcgctttagcttttcgttatcctcaattgaaatctttattaatttctttgtttcccaatgcatttaggtcctggagttggcaggcaacgcatcgaaggacttgaaagtgaaacgtatcactcctcgccacttacagctcgccattcgcggagacgaggagctggacagcctgatcaaggcaaccatcgctggtggcggtgtcattccgcacatacacaagtcgctgatcggcaagaaggaggaaacggtgcaggatccacagcggaagggcaacgtcattctgtcgcaggcctactaagccagtcggcaatcggacgccttcgaaacatgcaacactaatgtttaattcagatttcagcagagacaagctaaacacgacgagttgtaatcatttctgtgcgccagatatatttcttatatacaacgtaatacataattatgtaattctagcatctccccaacactcacatacatacaaacaaaaaatacaaacacacaaaacgtatttacccgcacgcatccttggcgaggttgagtatgaaacaaaaacaaaacttaatttagagcaaagtaattacacgaataaatttaataaaaaaaactataataaaaagcaatcatgttatttcaaaaaaaaaaaactagacgagatgttgcgctgtgtcgta

SEQ ID NO: 165 - protein, 141 aa, Drosophila melanogaster
MAGGKAGKDSGKAKAKAVSRSARAGLQFPVGRIHRHLKSRTTSHGRVGATAAVYSAAILEYLTAEVLELAGNASKDLKVKRITPRHLQLAIRGDEELDSLIKATIAGGGVIPHIHKSLIGKKEETVQDPQRKGNVILSQAY

SEQ ID NO: 166 - DNA, 711 bp, Drosophila melanogaster
atggactcggtggaaatgcccaaattaccggaaaaccagaagaccttcgccggcatcccggaggcagtgttcctggtgagtggtcctaacctacaagcgtgcacctgcagctggacactgcaggctaattcgtggttcttgggcccttgcaggaggagatcgacaccttcatgtcgcagccggagaacgaaaattgcgaaaaggtgctgcagcgactggacgagcagcacggcaagtatcgattcatggcctgcaatctggaggcgcggcggcgcaagttgaagtctcaaattccggacctggagcgctccctggaaatggtcaatgtgcttcgcaaggaggacgaggagcgcgagacgcaattcctgctcagcgaccaggtgttcatcaagacactggtgccgcccacgaaaacagtatacctctggctgggggccagcgtgatgctggagtatccgctagacgaggcggaggctctgctgaaccagaacatcacatcggccgtgggcaacctaaagtccgtggagcacgatcaggattttctgaggtcagttcgagtgctgttattcaagttacttgttttattgtattataaatgtatattttagggatcaaatcacaactacggaggtgaacatggcgcgggtctacaactggggcgtgaaaaagcggcaggccgctaccaagaccaccgccactaccccatcctaa

SEQ ID NO: 167 - protein, 190 aa, Drosophila melanogaster
MDSVEMPKLPENQKTFAGIPEAVFLEEIDTFMSQPENENCEKVLQRLDEQHGKYRFMACNLEARRRKLKSQIPDLERSLEMVNVLRKEDEERETQFLLSDQVFIKTLVPPTKTVYLWLGASVMLEYPLDEAEALLNQNITSAVGNLKSVEHDQDFLRDQITTTEVNMARVYNWGVKKRQAATKTTATTPS

SEQ ID NO: 168 - DNA, 2140 bp, Drosophila melanogaster
ccccccccccccgaatcgataacaacagcgacgataagcgcgcccgccttcttgtgaaattagcggaaagtcagatttttagcaatctaaagaagccgcataatgagcacctggaatccggagaacgatgtggacctgctgtctgggtccgaggacgaggaggatgtgtccatgaagcgggactaccatgggcgcgaggccattctgttcgtggtagacgccaatcttcagacagccggcgtggagcgcctgttggaggcactgaacatcatccggacggcctttatatccggacttctggttaacgacaaggacctcatcggactcatcttcgccaacaccaagcacagtccgccgccgctggaagccagtgcattggacaacatcgtaatgccggataactgcgcagtgttcttgccccttcgccaactaaccaaacccattgtggagcactatctggaattcatgggcggggtggagacgcagttcgccgatgtgtatggcctggcggaacccgatggtcgcggcaggtttgaccttatgatccggctctgcatcgagatgctggaaaagtgcggcaagaagctaaacaacgccaagatcgcctatgtcacggacgtcagggaacctcatccatcgaacagcaatcacttccaggctgccctgcaaaaggccagcgatctggagggcaaggagttcgagtttcatgtcattcccatggtcgatgactttgactacgagccgttttacaaggagttcatcacgttgtcaagagctatcgaactggacgccttccaggtgccagatgcccagatgctgcgcgaaatcctgtccgatcgtaagttgaagcaggatttccttcgccgatgcctgggccacttcagtttttatctgggccccaacctatccatgtccgtacagtactacaattactttcagcgacgcgcctatccgcgcaaagtgcaaatcctgcgcagggacaacagtgtggtgcgtactaagcgagtgattacggtgcaaaaacaaaaggacgatggctcgcaggatatcgagcacgagtatcagattaaggtgacgggcggttggtacacttgcaacgtgggcgaaagggatctgcgcatcagcatggatcagttgaacagggtgcgcaatctgcacaagccgcaaatgatgctgctgggcttcaagcatcgatcctctcttcccgaagttagctacatcaagccagcgaatttcatgtaccccgatgatcagagcatcatcggatcgaagcgcttgttccgcgcattgtgggaacgatgcttggtgcgcgacaagattgccatttgcctgttcatgtgcaagcgcaagtcgatacctcgctatgtggcacttgtgccagtagaggccccagataatggggaagataagaactatcgctctctgctctgcggtgacggattcaagattgtctacttgccggaggccaagcacatccgccacctagacttgcaggactggaacaatacggaaaacactgctgacgaacagaaagtcgagtttttccaaaagatcatcaagaagctgcgcgttgactatcagccgaatctcatcaacgatccaagtctggacgccctgcaggcgaatcttctggccctctccctggacttttcgacagatactaaaggactcgataatctgctggacacttcgcaacaggacaagcgcatagaaaagctgctgccggactatgaaatgttcgctccggaagcagaaccccctaagaagcgagcagccaagtccaccacagcgggagcgagcggtcccaaaatggccaagatcgatgatgatcaactcaaggaattcgaattcgtaaagagcctgaacaaggatgaggctctgacgagttgcacggccgcccagttgcattttattctgcagcatcacttcgatgttacaatgcccaagtcgtcaaagaaggcaaaactggtcgccaaaatcgaggaactacataagtaattaaaatattccatactttgagtgataaatctgtaccaatctagcttgtattaaccattggtaaacttaggattagaaaataatgttttgttgtccgaattgttaattaaatacataccaacacataattacttgtaaaata

SEQ ID NO: 169 - protein, 631 aa, Drosophila melanogaster
MSTWNPENDVDLLSGSEDEEDVSMKRDYHGREAILFVVDANLQTAGVERLLEALNIIRTAFISGLLVNDKDLIGLIFANTKHSPPPLEASALDNIVMPDNCAVFLPLRQLTKPIVEHYLEFMGGVETQFADVYGLAEPDGRGRFDLMIRLCIEMLEKCGKKLNNAKIAYVTDVREPHPSNSNHFQAALQKASDLEGKEFEFHVIPMVDDFDYEPFYKEFITLSRAIELDAFQVPDAQMLREILSDRKLKQDFLRRCLGHFSFYLGPNLSMSVQYYNYFQRRAYPRKVQILRRDNSVVRTKRVITVQKQKDDGSQDIEHEYQIKVTGGWYTCNVGERDLRISMDQLNRVRNLHKPQMMLLGFKHRSSLPEVSYIKPANFMYPDDQSIIGSKRLFRALWERCLVRDKIAICLFMCKRKSIPRYVALVPVEAPDNGEDKNYRSLLCGDGFKIVYLPEAKHIRHLDLQDWNNTENTADEQKVEFFQKIIKKLRVDYQPNLINDPSLDALQANLLALSLDFSTDTKGLDNLLDTSQQDKRIEKLLPDYEMFAPEAEPPKKRAAKSTTAGASGPKMAKIDDDQLKEFEFVKSLNKDEALTSCTAAQLHFILQHHFDVTMPKSSKKAKLVAKIEELHK

SEQ ID NO: 170 - DNA, 2951 bp, Drosophila melanogaster
tacaggcactaaccgtagctaaaaccgttgctctcgacgatacaacgccgtcgggctaggcctccttaactctgcgaccggttactgatgtcagaggcccggtgcggcattcattaacacggaataggcgttaggctacgagacctaatgccgggtcaaacatcactattcgaaacgccagacgtattagcaagctgaaaaacggaaaaaccccaatacagcttaaacattcagtacggaacgcacacacacgcatttacacaaacattctctcgcgcggatcttttaaggtaccaacaatacccattgcgaagcttattgtatgcacatggggtctatacacgtaataaatgacactacaaacaagcgaaaacgccctccggatttaaaccggctaacgtgaaggtatttttcacaacgtttaacgttaaaattactccgccgccgtgtgagtataaacgagggaaaaagacgacaagggcgacggagagaaaaagctaaataacggcgacggatacatacccacggaaactaaatttacggcaactgacgcacccggatgcatagaaaggttagcaggagtgaaggggtgagaggacatgaacatgcttaaatgaaaaaaccgtgtgagtgtggttttttttctcgaccgctacgtacgcagtacgccagttcttcttccgtcgtagtttccactcttctctcgcctcttgcctctcgctttagttcgtcgtcgacaacacttcgccctctctacgtctccctctctctctctctctcgcgcgtttttcgtgtctttttgcacacgcttcgacagtttttattaaagtttcggccgtttgtgtctgtcgtatgtgagcgtatacatctgtgtcacccctggtgtatacatgtatacaacttgataaacattacccatgaactaaaatcgtttaaggcaaaatatttttctcaagtggtaattacacgcccattaaatgagaattaactacgtctacgtctagtttaatttctatgtctttcaatacaaaattgacgtttcaaatgtttcaaataatttaaagacattagtacaatgaccacatatataatttctaatttttagtaagtaagttaactcaaactataacctagctcttggacattggacaacgtatactccgatacaaatccatcttcgaaaacgagatgatattcaggacggtcttaaaggagttataatgtataaattaaagtaatttaattgtaatttttacttcaaattttgaataacaaattaaaaacatgtatacacggtgtagggtgacattactgaattagggttgacttgattctataaacttggaatataccggacgtctagataggtgattgactgttaaaaatgagggacgttagaacgtcgaggaaacaccggaagctaccgttcttcgcatagtagccgcaccggcgattcttggtcgtccactgtttgtactttttgtgtcaaccgcctaagttcgcggacgaaccggcgtttaagttgctaggggtacatgttgtgcttgagtgctcgtaaggtcgcgcgcacctccgcgcgccactaccgtcgtaaccgtagttccacttgatggagcccctcctagtcgtaaagcctggactcgtcgactgccgctacgagaagtggttcgacttcctctgtagccgccgacggtacgtctgcgtccaattgctgacgcagtagcggacagggcacaagaaatggttacgtctcgcattccgagaggacctacggcgggtctagcggcctgacttgcaggacgctaactacttgctttgctgccggtggcgcgaccggatgccgaagatgttcttgctagacaagctcctgttcggtgcattgcactagaaacaactgaaacccgtgagcagtgacgtccggtcacggacacggaagtggttcccgtttgacttctacgaccggtcgtggaccctggtctagccacctgcgctgtaactgaaccgagacccgctaatgaagcggttcctcaaggtcctcgcaatgttctagttgcggttctggttacgggcacggttagacgcggacaattggctttagcttttcgacttcttcgtctacaggcggttgtcgtggttcgacggcaacttgtaactcacgaagaacctactatagctgcagagcagcaggtacgtcgccagcgtctacctcctcgacacgcgggggcagaacgtcgcgcagctcgtctgaaagttcgcaaacgatcggctcagattcgacgtcgacctgctgtaagtgaggcacctctagcaaccgccttcgagtgcgtaaggcaggcatttcgtcgaataactcgtccaatcagtttactacgttgggtacgatttacagtgtaaacattataaagcgaataataagcatccagaaattgttcggccgatcgtggtgagaattggtcctgcttcgacacagagcgcctcgtcgggaagtcacgcggtagtacagcggtcgacatgcgcaggctctcaaaccgcagtgactatatgtcttgatgcggcaattccacgacaccctgtcactcccgaggcgacgaggccctctctagctctagaagggcgttatggtacgaagaggcaagtcagcggacgactgttagttggcgttccctggcaagttgcaaagctaacacataccggttgtccacgggataggtctagtttgctaaccgcacaccttccagttcctacatttcggctgccttgcgccgctcccagtcctacatttcgactttcacgcgtagttgttgttaccgtaacacgattagagcaggcggtgaaaccaccttttcttcctccggcttctccgacggcgtcgacgactcgtccgacggtcacttctttttggtccgctagtctggttgttatgacctcttggacgcctaccagtcgttctc

SEQ ID NO: 171 - protein, 530 aa, Drosophila melanogaster
MSVIGIDFGNESCYVAAARSGGIETLANDYSLRATPSFVAFDGKKRIIGVAAKNQQVTNMKNTVGGFKRLLGRKFNDPHVQHELTSIPARVEARGDGSIGIKVNYLGEDQHFGPEQLTAMLFTKLKETSAAAMQTQVNDCVIACPVFFTNAERKALLDAAQIAGLNVLRLMNETTATALAYGFYKNDLFEDKPRNVIFVDFGHSSLQASACAFTKGKLKMLASTWDQIGGRDIDLALGDYFAKEFQERYKINAKTNARANLRLLTEIEKLKKQMSANSTKLPLNIECFLDDIDVSSSMQRSQMEELCAPVLQRVEQTFKRLLAESKLQLDDIHSVEIVGGSSRIPSVKQLIEQVFNKPASTTLNQDEAVSRGAALQCAIMSPAVRVREFGVTDIQNYAVKVLWDSEGSAAPGEIEIFPQYHASPFSRLLTINRKGPFNVSIVYGQQVPYPDQTIGVWKVKDVKPTERGEGQDVKLKVRINNNGIVLISSATLVEKKEAEEAAAAAEQAASEEKPGDQTNNTGEPADGQQE

SEQ ID NO: 172 - DNA, 8227 bp, Drosophila melanogaster; identical to SEQ ID NO: 66

SEQ ID NO: 173 - protein, 1148 aa, Drosophila melanogaster; identical to SEQ ID NO: 67

SEQ ID NO: 174 - DNA, 5206 bp, Drosophila melanogaster
atgttttccatgtgcaccaaggtgaaatcgcggagtgcggatccggacagctcgttcatgcagcaatcacagcagatgcagatgcagctgcagcagccccaagcgatgggtaagtggggaaagcaggaggcgtgggaaaatcggggagaaagtgaaaccgaaccgagactgagactgagtctcagaccgaaaatgcgccccgaaaggcagtagtcgacgtgccctcatttagcggaaaacccttgaactcgtttttgctgccccaccccaacggccccgcccctcgcttcccttttcggcccctcccagctgcttatttttctcaatgaactcacacacaggcgcagctgcgcgtctgtctgatactttctcttgcctcagtccctgcaccctgcgtcctgcttcctttcagaccacatcctgacccactcctgcgttgaacttatcaagcggtatccagtatgcggtttcagtatgctgcaattgttgacagtgccacgcccattacccagcgtgcgtgtgtgtgtgctctgcattaaatcattaagtagagacaacagagcccatatcgcagtaaacggacttggaacccgctggaaacgagtcgaggccaggatgtgaggatgccctggttgatgcagttcgtcgcatgcataaaacatgcgcttgcactcgcaggactctctatgtggaaaacacaactgaaaggtttatccagcttaaatttctagatgtacatactagttatataagttctttcaaatctagtcatatatcctttttccactaagactacatgttggggatatccaaagtaatttagcttggacattttattttgtgggagggaggaattcccttagcccaagttttacctctgaaataaatctatggaatatttttgcgagtgtgcgtgctactttggtatgtatatatccaagccctttatgcactctgatacgagtatctagccaggccagcaattatgtctgtacacgtttgtcgctgtcttcgccttcagattcgtcctggcccactgcgaacgggaatccgagtgtgaagtgggccaggtttcgttgtctgtggcaggcacttgcaattctagctgatttgtcatgtggatgtggatgtagttgtgaatgtcgatgtgtgtgtggatgcaaggatgcgagcatgcagaatgcccacatgcaagtgcggctgtgtgtgcgcgtgggcatggctacgtgcggttgtgtgcgtgcagtgaagtggcacacatgatgtccgctgccctgccttcttacacaagcaaggcagtgtccttcggcgagctcgttctcaccccagcaaccccaacccatgcaacaaacatgccaagtcccttgcccctggcagccccagttcccagctcatcctttcatcatctccttcgacacttggactgcgtctatcgtagtcgtctgcagttcgcttgcttctgctacacttgcaacattgaagaaagtcaaaagactgtcaactatatatgtttttaagtaatatactcataactcgtggagtaaataataaacttaaatcattgaaaagtattttgaaggtagaatgaagcccccttttagccagcaaattgctaaatcctgatttctttcaggacctcctttagctgaataacaggtatccgattgcttctgcagctcaactacaccattctctctcttttatcattgaccaagaccactaggccacatatatttctcaatgtgtatgaaaatggcagaggtcgcagggaaaagaagggcagatgcagaccattttgagggcaagcgccgttttttagcacgtcgagcctcgagcgtttttcaaatgctgtgcggcctgtgcaggccaatcgcattccattcccaggcggagcaaattgtcaccaggccactcgggtcgtaatcagtttgctgcaaaggcaacttttcgaatggtcgagtgcggaaaaaatgccagagaggtccttcaattccgaaattgcaagaatatcacccgaggcacatttaatcgcctatcagattctgggaacaagttcaatgctgggaatttatgagttattgctcttatgaaatcataaaaagttataaagttattctatatttttgctgatttcttcaaaaatctttatattgtttatatatttttattgtaataaaaaaaaccctttaagggtaaacataatcctacctaatataacttgttggtgatttgaaactgatggttaaatattactggcactagtatgggatttcctacttttttgaatgaacccttttccacacatattgagtttaaaggcaaaagatataaagatattcgttcttactgttacacagttgagcaatatgaacaaattaaggaaattaaatttaaatagaattctacactttatgttgaactcgtcgctggtggcaaaggtgtgaaatcgcttcggatcggttgcctttgccatctttattgaaatacttaattcagttcaccgcaagcgttgtgtttgtcactaccccaaatcctcccactcctccgccttctctgccttctggcgcccacctgcgactctcgatacttgaccaaataaatgggatgccagcggtaatgaatttgaaatgatcgacctggtccagccagcaggagcggcggctggctggctgattgagttgctggcgatgcagttccgggggaattgctaaatgaaattccgtgtttcgtttttcgccattcgttatccggcgcagcagtcgcacatggactcgcccacgcttgaaattttcagctcctgcttcggtgcgtgggcgcttggtccacgactgtcggctgtcggatgtcgaatggcgacgaaaaggaaagaagtccttgaatggaaaatgggctccagctgcagacctcgattcctgttcaattagtggtatcgtgtgactggcctctgggtacacaaaattgggctatgggcagcggatgcggactagatgggattcgctggcgcacttgactttacccacttggcactcactccattccattcctttcttcttctcttttcgcaggaactggtggaaaacaaatcaagggaggctatctactgcgctacaaaagtgagtatctcctgacttaagtataactatagcttagtaaatgaatcgatcgacagatatttcgatcaaacaattagatacttcagatatctgaataaatccataacacctgttagcgggataaagacctcgtattgcctcgtataagttatgccttcataaaatcttgaattcctggtgaattttataattaccccctttcgaggaggaattcacctgcgacaagagtagttgtccgacaattgcaggaccttgaatggacgatttaggccctttctctggctgtcagcacggtatgtaggcccggtccgcccagaggcgaccagagacccttggaagagacgacaatctgtcaaatcagcacaacagcagcagtcctcgcaggctcaggctcaacaagatgacgcagcatccgtggatgagttagatggatgtggtaccgtgcagggggaatggggtataatcatttcggggtcacattcaagggtaatgctttggcagcgccatggatgcgtcagtgtcatgcaaattaatgggataacaatataaaacacaggaatgaaagctaagctgcatttggatgcccttaggattgaataattattttaataatccttacttctaaactatatggaaaattacttcttttctgggttttattaagcattgaagatgatgaacttatacaatttgaatccaatatgaaaccatgtccttctgcctttacagagcaaatgttctggaaccgctgggcggaggaatgggtggtgctgtacgacgactcgaccatggcctggttcacggagccgggacgctcctcgccgacgggcaagatcctggtaaaggaggcgcctgagatgctggccatcgcccactggaccggccagataccgcgtcgtccgccgctgccggcgggcgtgaatgtgtcccagttgattgccctcggatcgcagcgcaagcggtcgaaggtctactggatgctggccaagtcggagcaggaggtgagcgactggatcgatgcgattaccaagaccctgccgccgccgcctcaaatcgagctggtggtggacaagccgcacctgatgaacgtgctccgtcgtccgctggtgcgcattagacgtgagtaaatcctcctaaacatccgtaatccacccggatactcgtttcgctcaagtcccctcgacgacaggtggtgtcgtttaactgatatacatattgactagggctgagaattagtatataaataagtaaactgtgcaaaccatagatataacagcaataataataataatagtaataatactatagaagttaaagtgaactttactgaaaaagaactcatgcttacaaagataaatatacatttctttgccattattaagatacttttggatatgattgagtcaggttttaagggccagaccgaattaagtaacaatttggagatttggataaaacgagaaatcggtgtgattagtaggccaaagctggaattatgaccttagccttcagtttatatcatagtagaatttcccattttcttatgcagcggccacccagtcggaggtgaagcagcggaaggcggcgtcacacggagccagcggcagtaaacaccaccgctgctcgtcggcgatttccacgaaggtgtatcggcagagccaggatccgctggtgaagagcgacgcggcggtggccattctcagcaagaagccggactcaaaggcatcgctggcctgcgccctaccctggggtcacggatggggatgggccacgctgcccaacggggtttggagcggcggactcacctggtcgcagtgcgaggacaccttcaccctgcacgccctgcccaccacccactgcaccaacctgatcgacacctcctgcagcggggcagtgtaccacacggacatcggaggcttcgactttcactcctcgggcgtcgatgacatcggcggcgaggacttcgactatgccatggactgcggtgatttcatattctaaactcccttcagcacaacccaccggcacgcaggacccattcgtccttggccgcagattttgacttcgattggaaggagctcagcaactggtag

SEQ ID NO: 175 - protein, 431 aa, Drosophila melanogaster
MFSMCTKVKSRSADPDSSFMQQSQQMQMQLQQPQAMDHILTHSCVELIKRYPVCGFSMLQLLTVPRPLPSQSHMDSPTLEIFSSCFGTGGKQIKGGYLLRYKTQQQQSSQAQAQQDDAASVDDIEDDELIQFESNMKPCPSAFTEQMFWNRWAEEWVVLYDDSTMAWFTEPGRSSPTGKILVKEAPEMLAIAHWTGQIPRRPPLPAGVNVSQLIALGSQRKRSKVYWMLAKSEQEVSDWIDAITKTLPPPPQIELVVDKPHLMNVLRRPLVRIRPATQSEVKQRKAASHGASGSKHHRCSSAISTKVYRQSQDPLVKSDAAVAILSKKPDSKASLACALPWGHGWGWATLPNGVWSGGLTWSQCEDTFTLHALPTTHCTNLIDTSCSGAVYHTDIGGFDFHSSGVDDIGGEDFDYAMDCDFDFDWKELSNW

SEQ ID NO: 176 - DNA, 805 bp, Drosophila melanogaster
atgtcggatgtagaagacgtgcccgaaacccagttagaaatcgatgtcagcgatggcgccggactggaggatgaggatgatgacgatatggaacagattacagctcagaaggtaaggtaaatcgtaacacagctttttaatacgcaagtaatcacattctgatatccctaggttctggaaatcatagaaaccgcgtggataaatgaaatgtgtgcgccggagatcctgcccagccagacggacatgctggagctgatggtctcccaggtggcccacatggaggagcagatgcgcgatctggacaagaacgatttccgagcggtggtgcactccatggaactggagagggtgcgctacataatggccagttatctgcgttgccgcctgcagaagatcgaaaccttcacgcagcacatcctcaaccaggaggagagccgtgagccggatgacaaacgtctgtctcccgaggagactaagttcgcccaggagtttgccagtaatgtggatgagtacttccacaaagtagccacccagtacatgcccaaccagcagagaggagaggcggagcagaggattgtgacgcccaatctgatgagccatgtctttcttaaggcaaatgtggcaggtaataaccttttgtcatctaattaagataaccgcttaactcttgttttgctttccagtgcccgctgtgatcgtgggcgtcgatgatgaggaggtggacatggcggccggctcccagcatattattccctaccaactagtggccgacttgatacaaaacaaccaagcgcagctaatttaa

SEQ ID NO: 177 - protein, 228 aa, Drosophila melanogaster
MSDVEDVPETQLEIDVSDGAGLEDEDDDDMEQITAQKVLEIIETAWINEMCAPEILPSQTDMLELMVSQVAHMEEQMRDLDKNDFRAVVHSMELERVRYIMASYLRCRLQKIETFTQHILNQEESREPDDKRLSPEETKFAQEFASNVDEYFHKVATQYMPNQQRGEAEQRIVTPNLMSHVFLKANVAVPAVIVGVDDEEVDMAAGSQHIIPYQLVADLIQNNQAQLI

SEQ ID NO: 178 - DNA, 652 bp, Drosophila melanogaster
taccgtcggcgtgttgtttgacttaaggttttcttaaaatctcactaacatctcttctagaagttagtgaccgtcctagaggccgaccgccacctcgtaccgtacccgcctgcgttaccggttgtccaacaacgagcatatgggactttggcagaagaaaagattggattagcctcacaggcaaaacatccaccggtatctttagtacctgatgtggatggtcatgacgcacaggttgcttttatagtgcgttccgcttgaccacctccaggacctcctcgactacctggtcctcaaattgtgggagacgctgctgctgaggtaaggcctctagacggccttagacgacgcgatgtttaactaccgggtcgtcttggtcaaaggcgtttatctccgacttaactcatttgaaggacgaccgttcctcaccgacgcaggcctacaattctagtggatgtgtgggtagctacccctgaggagtaggctactcctgtacctgctgtcgctgctcctcctgctattactttacccggtcccgctgctcctttgagggtcgccgtcaccagcctactgcgctagcgtccgtgctttcgtcgtccgactcctcaaacaccttggccttctgccgacctggtggcacgcttcttttact

SEQ ID NO: 179 - protein, 195 aa, Drosophila melanogaster
MAAAQQTEFQKNFRVIVEKIFNHWQDLRLAVEHGMGGRNGQQVAIEIMDYTYQYCVSNENITQGELVEVLEELMDQEFNTLCDDDSIPEICRNLLRYKLMAQQNQFPQIEAELSKLPAGKEWLRPDVKITYTPIDGDSSSDEDMDDSDEEDDNEMGQGDEETPSGSGRMTRSQARKQQAEEFVEPEDGWTTVRRK

SEQ ID NO: 180 - DNA, 3240 bp, Drosophila melanogaster
atggcacaaccccaaccaccggcgtacgaaaacagtgagttggaatcccacagagataaactggagtcatgaatccgatcccactccgaatgtgatacgtagagagggggatgagtcaacaggcgaaaaacggtaaaagcagaaagcaatcgccggaagcaccgtgattatgcccataaatgggcatagatgcatatgaaagacctttttaagcagtaagaggaggcgcgtgtggagccgttggagcgaccccgttcccgttcgctccccaaaaacgaagccgcaccctattttccacccactccaatttgccggcgttatctgagtagcagcagtcacagcccatttctaatcgaaataatcgcttaattgcagaaaacatctacgcaactctgccgcgcacccaacgcggccaacccatcgttttgggtgccgatcccaagggcaagaacttcctgtacaccaatggaaactctgtgatcatccggaacatcgaggtaagctgatatatgctgcagcctgctgctccgttcctgccataaatccatggcatttacgtccaaatggtgttttatttttggacaggctgcagtttctgttgccagtttgtgtgtgctttctggctttcgggcagctgttctatatttatttatatatatatgtacagtatataaggcgcaaaacacagattcccattccacaggccaaccggcaaaacacagactggcacatagatacatttcttgtttgccgcccacgcatcatcattatgatgttttcatctggtcaaagtgattcttcacagcagctatgtgtttgcctatctttcacccattgaatcggtataaattcaaaatatttccatgtttctttgtcttttgtcccgataatcccgccacttctatggtatctttaatgatcaagaaataaaatcttccgccaaaagatattcaggttctggaaaatgaaatgttaatgaaggaaacatacataacaaattcaaaaccaaacacctatgttcataattaggatcccatttaccattaatttgttttaatttgctaaaagtgtctctaaaatatgtatgtatgcttttccctttcttccgcaccatagaatccagccattgccgatgtctacacggagcactcgtgtgcagtgaacgtggccaagtactcgcccagcggattttatattgcatctggtggtaagtctcgcccagcaatttcacacttggagcacccggctttcggcaacagagcataaaaatcgtgaccactatgagtcacgccacggtcatgattagcatttccttatttggagcggtttctttatcttatctgcggttttgaagcgagcaatgttatttatttggctttctcctcttctcaccagacgcctccggcaagattcgcatttgggacacggtcaacaaggagcacctgcttaaaaatgagttccagcccattgcaggacccatcaaggatattagctggtcgccagacaatcagcgcatcgttgccgtgggtgaaggacgcgaacgtttcggtcatgtctttatgtctgaaaccggcacgtctgtgggcgagatcagtggccagtccaagtctattaactcggcggacttccggccagccaggccattccgcattgttacgggtgagttcacataatagtcccaaaatgcaataaacttacttacacacacacacttgttattacaggcagcgaagacaatactatcgccgtgttcgagggacccccgttcaagttcaagatgaccaagcaggatcactctcgcttcgtccaggctgtgcgctactcgcccgatggcaaattcttcgcctccgccggctttgatggcaaagtctttctgtacgatggcaccagctctgaactggtgggcgaatttggatctcctgcccacaagggcggcgtttacgcattggcctggaaaccagacagcacccaactgctaacctgctccggcgacaagacgtgccgcctttggacagtggagtcgcgcgagctggttagcgagtttgtgatgggcaccactgtggacgaccagcaggtgtcctgcttgtggcaaggagacaacctaatcaccgtctcgctttcgggcgtgatcacctacctcaatgtggcggatccctcgaaaccgctgcgtgtggtgaagggccacaataagcccatcaccgtgctgggactgagcgatgaccgcagcaccatatacacgggtagccacgatggcgtggtgaccaactggaactcgggcagcggcaccaacgatcgcatcacgggcactggacacggaaaccagatcaacggcattgccgcctggggtgactttgtctatacctgtggcatcgacgacagcctacgccagttcagcgtggagggcaactcctacacggactatgtggtgaagcttaactgccagccacgtggcttggccattttgcgcaacgagaacatcattgcacttgcttgcatcaaagagttgactctcgtgcaggaccagaagaagatcttttcgctgcccattaagtacgaggctagctcgattgccgttaatgcggacacttccgatgttgctgtcggcggggatgaccaaaagttgcacatctacaccctgaagggcggagtattggagcccaaagtggagctggatcacttgggagctgtcacggatgtttcttattcgccggacttgaagtatttggtggcttgcgatgcccatcgcaaggtggtgctctactcagtggaggagtacaaggtattaaggaatcataaatgtcttaattccattactaatcgagtgtattttaaaagcctgcacacaacaaggagtggggcttccacagtgctcgcgtaaatacggtggcctggtcgcccaactcgctgctggttgctagtggatcattggacactactatcattatctggtccgtggccaatccggccaaacatactatcatcaagagtaagtatttcaaaaagagtagtaagctttaagcgatatctgacatattgttttctgcccactccagatgcccatccgcagtcgcaaatcactcggttggtctggctggacaataacactgtgatctccaccggacaggactgcaacaccaaggtgtggcacgtggaaaacatttaaatgcgccggccgtgaagcatatttttatacttatccagggagagcagccagcagcgccctggcttcatttcatttaa

SEQ ID NO: 181 - protein, 613 aa, Drosophila melanogaster
MAQPQPPAYENKNIYATLPRTQRGQPIVLGADPKGKNFLYTNGNSVIIRNIENPAIADVYTEHSCAVNVAKYSPSGFYIASGDASGKIRIWDTVNKEHLLKNEFQPIAGPIKDISWSPDNQRIVAVGEGRERFGHVFMSETGTSVGEISGQSKSINSADFRPARPFRIVTGSEDNTIAVFEGPPFKFKMTKQDHSRFVQAVRYSPDGKFFASAGFDGKVFLYDGTSSELVGEFGSPAHKGGVYALAWKPDSTQLLTCSGDKTCRLWTVESRELVSEFVMGTTVDDQQVSCLWQGDNLITVSLSGVITYLNVADPSKPLRVVKGHNKPITVLGLSDDRSTIYTGSHDGVVTNWNSGSGTNDRITGTGHGNQINGIAAWGDFVYTCGIDDSLRQFSVEGNSYTDYVVKLNCQPRGLAILRNENIIALACIKELTLVQDQKKIFSLPIKYEASSIAVNADTSDVAVGGDDQKLHIYTLKGGVLEPKVELDHLGAVTDVSYSPDLKYLVACDAHRKVVLYSVEEYKPAHNKEWGFHSARVNTVAWSPNSLLVASGSLDTTIIIWSVANPAKHTIIKNAHPQSQITRLVWLDNNTVISTGQDCNTKGEQPAAPWLHFI

SEQ ID NO: 182 - DNA, 924 bp, Drosophila melanogaster
tactacgtttctaaaggctgcgtccgctggcacctcttaggtgcaatacctgtcgattagtatcctggaggaccaagacccttttggtggataacgccactccgggaattcaagatagcgcttgacccggcagtccacccgcaacacttagacctaggtcggttgcttttgtacaggatgcttggccacgattcacactacctcgattagtgacacctcctaacgtacctcgtggacttcgaccctggtttgcctcgagattacgtgacgcgactcatagaccggctggtaaacctcctaaccgacaacggccgtgacgcgtttgattcgcggtgaatgttgatgaaggacaagctgacagggccggttcaactcgatatatgggtagtgttgcgataccgggcctaaaagctcgcaaacctcgcactttctatatcggaccagtggcaattggaatatctaagggtaatgacgagcctcggacggtttaagtaacggtgaaacgactaccgtaacttgtggtacaacgcctactcagatggggtgcaattacacgaaaggttccggctagacgatttcttcgtgctctggttcaatgtgaaattgcacctgataatatgcctgcaggacctggagttcatagacgacctgtttgacctgctactagggcggtacgcgttcatagcttttgacttacgtcggtagacgaggtaccacctcctgatgcgagagcaaagcaaggttgacgacctgcagaagtcgtgcctgtcgtacgaggcgaacgcgttagtgtagctgttccgattacctatgcagatgttccgtccactcctcgtctgccagttgagtgatgatcggacgcggcacccacgtctttgactccggcgagcgtacctcgtactacaggttgggatataccttatt

SEQ ID NO: 183 - protein, 307 aa, Drosophila melanogaster
MMQRFPTQATVENPRYGQLIIGPPGSGKTTYCGEALKFYRELGRQVGVVNLDPANENMSYEPVLSVMELITVEDCMEHLKLGPNGALMHCAEYLADHLEDWLLPALRKLSATYNYFLFDCPGQVELYTHHNAMARIFERLERERYSLVTVNLIDSHYCSEPAKFIATLLMALNTMLRMSLPHVNVLSKADLLKKHETKLHFNVDYYTDVLDLKYLLDKLDDDPAMRKYRKLNAAICSMVEDYALVSFQLLDVFSTDSMLRLRNHIDKANGYVYKAGEEQTVNSLLACAVGAETEAARMEHDVQPYME

SEQ ID NO: 184 - DNA, 2821 bp, Drosophila melanogaster
gctttcctgtcgaaacgccgttgaaaggcgtagtgtttttttggtccgcgagaaaatctccatacatccaaaatggtcaacttcaccgtcgacgagatccgtggcctcatggacaagaagcggaacatccgcaacatgtctgtgattgcccacgtagaccacggcaagtccactctgaccgattcccttgtgtcgaaggctggtatcattgccggagccaaggctggtgagactcgtttcactgacacccgcaaggacgagcaggagcgctgcattaccatcaagtcgactgccatttccatgtactttgaggtggaggaaaaggatctggtgttcattacccaccccgatcagcgcgagaaggagtgcaagggtttcctgatcaacttgatcgactcgcccggtcacgttgacttctcctcggaggtgaccgccgcccttcgtgtaaccgacggtgcactcgttgttgtagactgcgtctccggagtttgtgtccagaccgaaaccgtgctgcgtcaggccatcgctgagcgtattaagcccatcctattcatgaacaaaatggaccgcgctctgcttgagctgcaactagatgccgaggagctgtaccagaccttccagcgcatcgtcgagaacgtaaacgttatcattgccacctataacgatgacggaggaccgatgggtgaggttcgcgtggatccctctaagggatcagtgggcttcggttctgggcttcacggctgggcgttcaccctcaagcagttctctgagatgtactccgagaaattcaagattgatgttgtcaagctaatgaaccgattgtggggtgaaaacttctttaacgccaagaccaagaaatggcagaaacagaaagaggctgacaacaaacgctcgttctgcatgtacatcctggaccccatctacaaggtgttcgatgccattatgaattacaagaaggaggagataggtaccttgctcgagaaaatcggtgtgactctgaagcatgaagacaaggacaaagatggcaaagctctgctgaagactgtgatgcgcacctggctgccagccggcgaggctttacttcagatgattgctattcatttgccgtcgccagtggttgcccagaagtaccgcatggagatgctgtacgaaggtccccatgacgatgaggccgctatcgccgttaagtcttgcgatcctgatggtcctctaatgatgtacatttctaagatggtaccgacctctgacaagggtcgcttctatgctttcggtcgtgtgttcgccggtaaggtggccaccgggcaaaagtgccgaatcatgggccccaactacactcccggcaagaaggaggacttatatgagaaggctattcagcgcacaattctcatgatgggtcgttacgtcgaggccatcgaggatgtgccctctggcaacatttgcggtctggtcggtgttgatcagttcttggttaagaccggtacgattaccaccttcaaggacgcccacaacatgaaggtcatgaagttctccgtgtcccctgtggtgcgcgtggctgttgagccaaagaaccccgcggacttgcctaagctggtggagggcttgaagcgtttggctaagtccgatcctatggtgcagtgtatcatcgaagagtccggcgagcatatcattgctggtgccggtgagctgcatttggagatctgccttaaggatctagaggaagaccacgcttgtatcccactgaagaagtctgatcccgtcgtctcctaccgtgagactgtgtcggaggagtccgaccagatgtgtctgtccaagtcgcccaacaagcacaaccgtctgctgatgaaagccctacctatgccagacggtcttcccgaggacattgataacggcgaggtgagtgccaaggatgagttcaaggctcgtgcccgttatttgtctgagaagtacgactacgatgtgactgaggcccgtaagatctggtgcttcggccccgacggaaccggtccgaatttcatcctcgactgtaccaagtccgtgcagtaccttaacgaaatcaaggactctgttgtcgctggattccaatgggcctcaaaggagggtattttagccgacgaaaacttgcgcggtgtccgcttcaacatctacgatgtgacacttcacgctgatgccatccatcgtggtggtggccagatcattccaaccactcgtcgttgtctgtacgctgccgctataaccgccaagccgcgcctgatggagcctgtttacctgtgcgagatccagtgccccgaggttgctgtaggaggaatatacggtgtgctcaacaggcgacgtggccatgtattcgaggaaaaccaggttgtgggcactcccatgttcgttgtgaaggcatacctgcccgtcaacgagtcattcggttttaccgccgatctgcgctctaataccggaggacaggccttccctcaatgtgtcttcgatcattggcaggtgttgcctggcgatccgagcgagccctcaagcaagccctatgccatcgtccaggatactcgtaagcgcaagggtcttaaggaaggattgcccgatctatcccagtacttggacaagttgtaaagcaccaccacccgatcccccacaacatccaagtgcagctggctgagcggaaaagcatagaaaaatatggagtgaccgaatttaacatctttattcggcaaggcacttgaaacatcgcctttggtcaatgttttaaaacaaataaaaacaataaaaattttgatgattatgaattgtataacattaaatcaagaataaatcaagtaaatgattt

SEQ ID NO: 185 - protein, 844 aa, Drosophila melanogaster
MVNFTVDEIRGLMDKKRNIRNMSVIAHVDHGKSTLTDSLVSKAGIIAGAKAGETRFTDTRKDEQERCITIKSTAISMYFEVEEKDLVFITHPDQREKECKGFLINLIDSPGHVDFSSEVTAALRVTDGALVVVDCVSGVCVQTETVLRQAIAERIKPILFMNKMDRALLELQLDAEELYQTFQRIVENVNVIIATYNDDGGPMGEVRVDPSKGSVGFGSGLHGWAFTLKQFSEMYSEKFKIDVVKLMNRLWGENFFNAKTKKWQKQKEADNKRSFCMYILDPIYKVFDAIMNYKKEEIGTLLEKIGVTLKHEDKDKDGKALLKTVMRTWLPAGEALLQMIAIHLPSPVVAQKYRMEMLYEGPHDDEAAIAVKSCDPDGPLMMYISKMVPTSDKGRFYAFGRVFAGKVATGQKCRIMGPNYTPGKKEDLYEKAIQRTILMMGRYVEAIEDVPSGNICGLVGVDQFLVKTGTITTFKDAHNMKVMKFSVSPVVRVAVEPKNPADLPKLVEGLKRLAKSDPMVQCIIEESGEHIIAGAGELHLEICLKDLEEDHACIPLKKSDPVVSYRETVSEESDQMCLSKSPNKHNRLLMKALPMPDGLPEDIDNGEVSAKDEFKARARYLSEKYDYDVTEARKIWCFGPDGTGPNFILDCTKSVQYLNEIKDSVVAGFQWASKEGILADENLRGVRFNIYDVTLHADAIHRGGGQIIPTTRRCLYAAAITAKPRLMEPVYLCEIQCPEVAVGGIYGVLNRRRGHVFEENQVVGTPMFVVKAYLPVNESFGFTADLRSNTGGQAFPQCVFDHWQVLPGDPSEPSSKPYAIVQDTRKRKGLKEGLPDLSQYLDKL

SEQ ID NO: 186 - DNA, 1335 bp, Drosophila melanogaster
atgcctacgacattgatgttgctgccgtgcatgctgctgttgctgctgaccgccgctgccgttgctgtcggcggcacgcgactgccgctcgaggtgttcgagattacgccgaccacatccacagcggacaagcacaagagtctgcagtacaccgtcgtctacgatgccaaagatatttcaggagcagcggcagcaactggagtggcgagcagtacagtgaagcccgccaccgagcaactgaccgttgtgagcatttcctccacagcggctgcggagaaggatctcgccgagtcgcggcgacatgcgcgacaaatgttgcagaaacaacagcagcatcgcagcatcatcggcggcaagcacggcgatcgggatgtgcgcatcctctaccaagtgggggactctgaagaggatttgcccgtctgtgcaccgaatgcagtttgctccaagatcgatctatacgaaaccccgtggatcgagcgacaatgtcgttgtcctgaatcgaatcgcatgcccaacaatgtgatcatccatcatcacagtcattcctcgggatcggtggattccctgaagtacaggaactactacgaaagggagaagatgatgcagcacaagcgaatgctgttgggtgaatttcaggataagaaattcgaaagtctgcatatgaagaagctgatgcagaaactgggcgccgtctacgaggatgatttggatcatctggaccagtcgccggactataatgacgccctgccctatgcggaggtgcaggacaatgagtttcccaggggatcggcgcacatgaggcattccgggcaccgaggatccaaagagcctgcaaccacattcattggcggctgtcccagcagtttgggcgtggaagatggccacaccattgccgataagactaggcattacaaaatgtgccagccggtgcataagttgccagtttgcaaacacttccgtgactacacttggactttgacaacagcagccgagttgaatgtgacggagcagatagtccattgtcggtgtccccggaattcggtgacatacttgaccaagagggaacccattggcaatggcagtccaggctacagatatctgttcgcctgctctcccctgacgcgtcttcgctgtcagcgaaagcaaccgtgcaaattgttcacggtgcgaaagcgccaggagttcctggacgaggtcaacattaactcgttgtgccagtgccccaaaggacgccgctgtcccagtcatcacacgcaatccggcgtgatagccggcgagagttttctggaggacaacatacagacatattccggttactgcatggccaacgattga

SEQ ID NO: 187 - protein, 444 aa, Drosophila melanogaster
MPTTLMLLPCMLLLLLTAAAVAVGGTRLPLEVFEITPTTSTADKHKSLQYTVVYDAKDISGAAAATGVASSTVKPATEQLTVVSISSTAAAEKDLAESRRHARQMLQKQQQHRSIIGGKHGDRDVRILYQVGDSEEDLPVCAPNAVCSKIDLYETPWIERQCRCPESNRMPNNVIIHHHSHSSGSVDSLKYRNYYEREKMMQHKRMLLGEFQDKKFESLHMKKLMQKLGAVYEDDLDHLDQSPDYNDALPYAEVQDNEFPRGSAHMRHSGHRGSKEPATTFIGGCPSSLGVEDGHTIADKTRHYKMCQPVHKLPVCKHFRDYTWTLTTAAELNVTEQIVHCRCPRNSVTYLTKREPIGNGSPGYRYLFACSPLTRLRCQRKQPCKLFTVRKRQEFLDEVNINSLCQCPKGRRCPSHHTQSGVIAGESFLEDNIQTYSGYCMAND

SEQ ID NO: 188 - DNA, 1000 bp, Drosophila melanogaster
gttttccgtcgcgtgtgaaaattgctgagtgtataaaaactgtgcatacttagagaaaacttctgcatttggttgaaagttctttgctgacaagatgaagttccgcgcactgatgcaggatccgctgtacatgaaagagttccaggccattgtggccactttaaccaagctggcgaaagattgtgtgatgattctgggctctcggcagatgcattttatcgtgaacgaggatcagagctccgctgcatcgcccttggtttgggcaggaattacagctgaggagtattttccggagtatcgcatggaggctgctcacccggatcaggagtacatagttctaggcgtgtcttcggcgaatctcggaagagctttatctgtgcttcgtggtggaggcgtaaacagctgcaaactgaagcttcaaagaattcagtttccgtgcatttcggtaatagcctcggtgcttacgtcgtcttcaacagaagcccgtgaagtggtgcacgatgttccagtgaccataatcccgggcagcgattggtctgcctacgttgtacccagagttccaaactcacagttggctttgggcctaccaagcctaagattgctcaaaagtctcattgacaagctgaagaatatatcacccagcctggattttcaggtcaacgtggacggagagctcaatgtaatagccacctctgaaatgtccactgtgactagtcgattccagaaattactaattcgaactgtgtcaggatcccagcaagaagcgtcctgctctgtggattcaaggaaagcctcggccttctttggagcacttcaactccctaacgaagaactgactattggcattgaccgtgagcattccatccatctgcagatcgatgtacgacaggatgtggttctgcactctattctgccagctgtttgtatgtagcctaagagctggtatgtttatcatagctgtaataaatgcgacttgatgtattcaggtgtaaaaaaaaaa

SEQ ID NO: 189 - protein, 278 aa, Drosophila melanogaster
MKFRALMQDPLYMKEFQAIVATLTKLAKDCVMILGSRQMHFIVNEDQSSAASPLVWAGITAEEYFPEYRMEAAHPDQEYIVLGVSSANLGRALSVLRGGGVNSCKLKLQRIQFPCISVIASVLTSSSTEAREVVHDVPVTIIPGSDWSAYVVPRVPNSQLALGLPSLRLLKSLIDKLKNISPSLDFQVNVDGELNVIATSEMSTVTSRFQKLLIRTVSGSQQEASCSVDSRKASAFFGALQLPNEELTIGIDREHSIHLQIDVRQDVVLHSILPAVCM

SEQ ID NO: 190 - DNA, 503 bp, Drosophila melanogaster
atgtatctgagcaagtccaatacggaggaggatgtgactctgaggttccactgcccagggggtccgcgtccgctggtcgagattgcgaactaatgcccctggcgagaagccaaaagcgcgatgcaaccctcttgtcaagaccattgtttggatgtttagctgttcggttgtttggatgtttgaatgtttggacttgttctggcgaaacaatcccgagccaatgccaatgccaaagctaaaccaatgcccgcaatgaaacaagaaataagacaacgacaaactggcagcattcgctgtagattagcccgcccgatcgccgcaaataaacaagttcacaaataagccagtcgagagcaaaagagcattgtgttatgttcgcggaccagatctctgatgattccgtggatgaggatgagtatgagcatgaggatgtgccgggttgggaactcagcactcagcactcagaatccagaacccagaatccagaaccaaaagtcaactag

SEQ ID NO: 191 - protein, 49 aa, Drosophila melanogaster
MYLSKSNTEEDISDDSVDEDEYEHEDVPGWELSTQHSESRTQNPEPKVN

SEQ ID NO: 192 - DNA, 3398 bp, Drosophila melanogaster
ccccccgattttcgtctcaaacttggaagatatattgccaaaatattgcattcggctagcgctgcgttgtgtgtgttgttgtgcgtggagttgcgtgtgcagttgcaagaagatatagttgtctatatcgccagactgatctcgatcccaagtgcgattcccgttggtaacatactgcccgttcggtaggcaacaaaatggtgaacgtaaccatttacgatgaggcaccgcagctgaaggtaggccaatgtcacggtaatagaagccctcagagttggtccataaagatattcataatcgccataatcagttggctggcgagttggctcgatatcagagtcattggggaggaaaatgtgggaaaagacaattatgcaactgcagctgagaaaattctgtcggtcgcggtcggcagaactgaccttcggcggtgcagatgtgcagcgctgccggtgtcggcttcgctgcacacttttcttccgcctgctgctttctctctgccactctctcttccgctctgcctttctcaggtcctctctacgggggacacccctaaccacccacgcccatccactcaagcacttcaagtacacgcactttgtttacatcagcgaattctgcagcgacagctttgcgtttttcaaaacataacatgcacagtgcgaataaatattttgataatttaagcaatcgtaagagttaacaaatagtattaacgcaacagcatcatttaatattggtaatcgattataacattttatatgtcaagttttatcaatggcttatttacacatgctactaagtataatcagaatgataaaatactgttaatatataacgttatcattttaattaggattattagattatttaaaatcattacctttatatgtaaatagctctattttatctgtcagttcacaaatatttcaatcattccttttgtcatgaaaaatgattggtgcggcggcatttgggcttaaatcgccgtatttggccgtttggttctatttataagccggtggtaaacatttaatttggtcgataaaaactgtatcgatttatattcgttgatatgaagaagggttatcatgagttttgcacgcattcaccgcgtttatgttggggttttaaatgtgtttcgcattgcatgacttcaccagggcatgattttaatatcataaaactagttggtttttttattttttgctagaacttggtagtttttaaaacgcgtagggtttcttgttgctaggaagagacttctgattattagcgtaaattggaaataaatgcttaaaatcaataaacacgactttaacctgttttattgcaaaagttggcaatcagcgtgttgatttctaaaaataaagaatcaattcgcgctgtttataaatatgaagagaaatgaaaacaaacagaattaagtatagttttcattttgcagcccaacgaagtaccccaaaacatggccgcaggagctgatacccaactggagcacatgtgccgtctgcagttcgactcgccagtgccccatgtgcgtctgtccggaatcgtgtgcaccatcggacctgcctccagcagcgtggagatgctggagaagatgatggccaccggcatgaacatcgcgcgcatgaacttctctcacggatcgcacgagtaccatgccgccaccgtggccaatgtgcgccaggcggtgaaaaactactcggccaagctgggctacgaacaccccgtggccattgccctggacaccaaggggcccgagatccgtaccggtctgatcggaggcagcggcaccgccgagattgagctgaagaagggcgagaagatcaagctgaccaccaacaaggaattcctggagaagggctctctggagattgtgtacgtggactacgagaacattgtcaatgtggtgaagcccggcaaccgggtgttcgtcaatgacggtctgatctcactgattgtccgcgaggtaggcaaggattccctcacctgcgaagtggagaacggcggctctctgggttcccgcaagggtgtgaacctgccaggcgtgcccgtcgatctgcctgccgtctccgagaaggataagagcgatctgctgttcggtgtggagcaggaagtggacatgatctttgcttcgttcatccgcaacgccgctgctttgaccgagatccgtaaggttcttggcgagaagggcaagaacatcaagatcatttccaagatcgagaaccagcagggcatgcacaacctggacgagatcatcgaggccggtgatggcattatggtagcccgtggagatctgggtattgagattcccgccgagaaggtgttcctcgcccagaaggccatgattgcccgctgcaacaaggctggcaagcctgtgatctgcgccactcagatgttggagtcaatggtgaagaagccacgtcccactcgcgctgagatctctgatgtggccaacgctgtgctcgatggtgctgattgcgtcatgttgtctggtgagaccgccaagggcgagtacccgctggagtgcgtcctgaccatggccaagacctgcaaggaggccgaggctgccctctggcaccagaacttctttaacgacttggttcgcggcgctggtaccatcgatgcctctcacgcggctgccatcgctgccgttgaggctgccaccaaggccaaggcctccgccatcgtggtgatcaccaccagcggcaagtcggccttccaggtgagcaagtaccgcccacgctgccccatcatcgcggtcacccgtttcgcgcagaccgcccgacaggcccatctctaccgtggactggtgccactcatctacaagggtaggtttttgtttctccaggtcgttctttaaattataactctggcttgtacttgcagagcccggtcttggtgactggctgaaggacgtggacgtgcgcgtgcagttcggtctgcaggtcggaaagaagaacggcttcatcaagaccggcgattccgtcgtggtggttaccggctggaagcagggctccggcttcaccaacaccatccgcattgtgtaagtttaaattctagcatgtagatatatatgtatctgtgcaaaaattatatcaacaaaactaacgcaattatctatcatttcagcaccgtcgaataattctgcacgctcaggaagtacctggatgcgtcgcagctgccgcgggcgtcgcgttgattactgttaataaccaagttaatttattaattacacaatattcggaatattggaaactgcaggaggctgctggaaccgctgtcagaagcgccgaaggcgcccgggcctcaaacagacacacaaactataccattgttgaataatagagatttcttcgaaaattataataaagtcatcactgtatttatgt

SEQ ID NO: 193 - protein, 533 aa, Drosophila melanogaster
MVNVTIYDEAPQLKPNEVPQNMAAGADTQLEHMCRLQFDSPVPHVRLSGIVCTIGPASSSVEMLEKMMATGMNIARMNFSHGSHEYHAATVANVRQAVKNYSAKLGYEHPVAIALDTKGPEIRTGLIGGSGTAEIELKKGEKIKLTTNKEFLEKGSLEIVYVDYENIVNVVKPGNRVFVNDGLISLIVREVGKDSLTCEVENGGSLGSRKGVNLPGVPVDLPAVSEKDKSDLLFGVEQEVDMIFASFIRNAAALTEIRKVLGEKGKNIKIISKIENQQGMHNLDEIIEAGDGIMVARGDLGIEIPAEKVFLAQKAMIARCNKAGKPVICATQMLESMVKKPRPTRAEISDVANAVLDGADCVMLSGETAKGEYPLECVLTMAKTCKEAEAALWHQNFFNDLVRGAGTIDASHAAAIAAVEAATKAKASAIVVITTSGKSAFQVSKYRPRCPIIAVTRFAQTARQAHLYRGLVPLIYKEPGLGDWLKDVDVRVQFGLQVGKKNGFIKTGDSVVVVTGWKQGSGFTNTIRIVTVE

SEQ ID NO: 194 - DNA, 3870 bp, Drosophila melanogaster
atgacgactgacacccgccgacgcgtcaagctgtacgcgctgaatgcggaacggcaatgggatgatcgtggcactggccacgtgtcatccacctatgtggaaagactaaaaggtgggtttacgaaattaatgaagccttgcgaagtgatttaagtttcctattgctcactaacaacttacaggcatctcgcttttggtgcgagccgaatccgatggatctctacttttggagagcaagatacaaccggacaccgcataccagaagcaacaggatacgctgatcgtgtggtccgagggggataactttgatctggccctgagtttccaggaaaaggcgggctgcgacgaaatatgggaaaagatatgtcaggtaagcgtcgttgaataagcatatgcagttataaatgtgcttatctatatatcaatgaacttaaacaatttctatatggttttcacatcaattgccaactaaaacttttgcaggtgcaaggcaaggatccatctgtagaaataactcaagacatcgtcgaagagtctgaggatgagcggtttgaggacatgtcggatactgcgccacccattgagctaccaccctgcgagctttcccggctggaggacatctcggaaacgatacaaagctgtctctccacgccgctgcgaaaggaaaagttgtcgatggctctggagtcggagagctatatcaagaagctgctgaacttgttccacgtgtgtgaggacctggacaataccgagggcctgcatcacctttttgagatcttcaagaacatcttcttgctaaataagaacgcgctctttgagattatgtttgcggatgataccatctttgatgtggtcgggtgcctggagtacgatccgagtgtgtctcagcccaaaaagcatcgacagtatctgaagcagttagccaagttccgcgaggcagtgccgattaaaaacctggacctgctggctaagattcaccagacgttccgggtgcagtacatccaggacattatcctgcccacaccatcggtctttgtcgaagacaacatgctgaacaccctgtccagcttcatcttcttcaacaaggtggagattgtcacgatgatccaggacgacgagcggtatctcctggatgtgtttgctgttctcaccgatcccaccaccggagacgcgaaacgccgcgacacagttctcttcctcaaggagttctgcaactatgcccagaacctgcagccgcagggcaaggactcgttctacaaaactctcacctgcctaggcattctgcaggcgctggaactcactctcgtgatgaacgacaagaagaccaaatcggcctccatcgacatcctcacggccatcgtagagttctcgcctctggtagtgcgcaattacacgctcaaccaggccaatcggccagaagtggtaagttaacctggaatatgaagatagtctagatatgactatgatttacatgatttcttttttttttcacaccaggagcgtatgctactgaacattgccatcgaacaaatgctgaatgactcggagccggagcttggaattgcggtgcagctaatgggtatcgtcaagattctgttggagccggaaaacatgctcaccgagaagggcgattttctcaacttcttttacaaatacagtgtgcaaacgttagtgggtaagtgcgagtactctataccagcatattctagagactaactgcttaatgggttatagccccggtgatacttaacacgataggcgaccgtccgcaaaacgaggactatcagacggcccagctgctgggaatcgtcctggacattctttcgttctgcgtggaacaccacagttatcacattaaaaactttttgttgcaaaaggatctcctcaagcgaatactggtgctaatgaagagcacacatacgttccttgtcctcggcgctctgcgattactgcgcaagataattgcacttaaagatgagttttacaataggtaagcgtccccaaaaactcttatggttaaacaatataaccaacttaccttacttacagacacattgtcaagtgcaatctgtttgcgccggtggtagatgccttcattcgcaacaacggccgatacaaccttctggagtcagcaattctggagctgtttgagtttataaaactcgaggatatccgcactctgtgcgtttacttcgtggagaacttcagcaagatatttgatgaaatcgaatacgtgcagacatttaagtacttgaagaatcgctacgatcagtaccaggatcggcttaaggaccgcgacaagatggaaaaccgaactgacgggtaagttttgctgcagcgccttgtgctacaacacaatgtgaaaatatttggctgtattatcttaaagtggcctgcccatcatccgtagcggtggccggtttcgtcgggatcagcggcaaatggaggaggaagaggaaatgtggtttaacgaggaggacgatttcaccgaggaaatcgacacatacaacaatgtcatgaaatgttagtactaaattaatatcgttttagcattaccaaaccaaatatattgtggcgaatatctaagcaaaaaagctaatattcaaaaacattacattattatttatgtaccattgatgaattgtaaatatattccgatctcgacttgcagccgtcagcgaaaagaatggcccgcaaacgcaaaaccagcagaaatcctctccgccacacagcacgtcgccgcacagtggattgttgggaagcctgagcaccaccgcgtcatccactgccacatccgccacgtcaggtgcaccggtggccagcggcagcagtagccccgaggccatctccgccgacgagcagacgcaggcggcggtgcatttggctgccgctgcccttcagcaccaccagcaacagcaacagcagcagcagcagaacccattccagcaacagacacagcccgagatcgcggagctacaacagcagctgagcagcgtggaagcgcctcaaagccaggagttggagctgtcacaatcggccgccgccagtgcatcgcccacttcgtcatcctcgtctctggaagcctcgacgtcctcttcatcggcgtcatcgtcttcatcctcgtcgtcctcgtcctcgccgcccggctcatcggccgcagcatcgctatgcgattcggcgacagtagccgccgtggcagcatcacagtttctctcaacgatcgccacagccatggcggcctctgtgacggcggcggcggcaacaaacagctccccgagcatttcgccagctccagctgtgtccagtccggatatcgagaacgccgacgcccagttgccgcccagcgatgacgccagcagcccggccagtggggagcaagacgctaacagcacggaaggtaccagcagtgaggccgacaagacgacggccaaaaaggtaagttgtggaacccataaaatgggaatgtcatagtgttttctgtagtattacttgtgaattgtggattttatcttcaaaatgcgtgcttaaatatttctataatgaatcaatgtttaagttgtaaatataggagcattggcaaatatttaaataaaaagctaaaattccctcacaaacttgaagcaacaatatgcctgcatgtatgggtatacaattaccttctattctgtgacgattaaagtgcacgactattataagaagtttaagtagcgttacgtatgaataacaaatgtgtggatgcattaattatattattttcgttaccataaacagggtctggtggactatgagagtgattctggcgaagatgactacgaggaggatgagtactccgaggggccacaagcacaaaagcgcgcgcgtcaggcatag

SEQ ID NO: 195 - protein, 980 aa, Drosophila melanogaster
MTTDTRRRVKLYALNAERQWDDRGTGHVSSTYVERLKGISLLVRAESDGSLLLESKIQPDTAYQKQQDTLIVWSEGDNFDLALSFQEKAGCDEIWEKICQVQGKDPSVEITQDIVEESEDERFEDMSDTAPPIELPPCELSRLEDISETIQSCLSTPLRKEKLSMALESESYIKKLLNLFHVCEDLDNTEGLHHLFEIFKNIFLLNKNALFEIMFADDTIFDVVGCLEYDPSVSQPKKHRQYLKQLAKFREAVPIKNLDLLAKIHQTFRVQYIQDIILPTPSVFVEDNMLNTLSSFIFFNKVEIVTMIQDDERYLLDVFAVLTDPTTGDAKRRDTVLFLKEFCNYAQNLQPQGKDSFYKTLTCLGILQALELTLVMNDKKTKSASIDILTAIVEFSPLVVRNYTLNQANRPEVERMLLNIAIEQMLNDSEPELGIAVQLMGIVKILLEPENMLTEKGDFLNFFYKYSVQTLVAPVILNTIGDRPQNEDYQTAQLLGIVLDILSFCVEHHSYHIKNFLLQKDLLKRILVLMKSTHTFLVLGALRLLRKIIALKDEFYNRHIVKCNLFAPVVDAFIRNNGRYNLLESAILELFEFIKLEDIRTLCVYFVENFSKIFDEIEYVQTFKYLKNRYDQYQDRLKDRDKMENRTDGGLPIIRSGGRFRRDQRQMEEEEEMWFNEEDDFTEEIDTYNNVMKSVSEKNGPQTQNQQKSSPPHSTSPHSGLLGSLSTTASSTATSATSGAPVASGSSSPEAISADEQTQAAVHLAAAALQHHQQQQQQQQQNPFQQQTQPEIAELQQQLSSVEAPQSQELELSQSAAASASPTSSSSSLEASTSSSSASSSSSSSSSSSPPGSSAAASLCDSATVAAVAASQFLSTIATAMAASVTAAAATNSSPSISPAPAVSSPDIENADAQLPPSDDASSPASGEQDANSTEGTSSEADKTTAKKGLVDYESDSGEDDYEEDEYSEGPQAQKRARQA

SEQ ID NO: 196 - DNA, 107 bp, Drosophila melanogaster
tacgacgcggtcttggacaacctagtcgaattcgtgaagtatctctgccactcgttacccgtgtcaacaggcgtcgacgactggtcggggttagagtagttcgagcg

SEQ ID NO: 197 - protein, 35 aa, Drosophila melanogaster
MLRQNLLDQLKHFIETVSNGHSCPQLLTSPNLIKL

SEQ ID NO: 198 - DNA, 1521 bp, Drosophila melanogaster
aaatccgaggaacccgaggagtccgaactctaccacacagaaacccacagaaacagacgtaacaaaatggagctgcgcgtgggtaacaaatatcgcctgggccgcaagataggatcgggatcgttcggcgacatctacctgggcaccacgatcaacactggcgaggaggtggccatcaagctggagtgcatccgcaccaaacacccccagctgcacatcgagtcaaagttctacaagacgatgcagggtggcataggcataccccgcataatctggtgcggcagcgagggcgactacaatgtgatggtgatggagctactcggaccctcgctggaggacctcttcaacttttgttcacgccgcttttcgttgaagacggttctgctgctggcggaccagatgatctcccgcatcgattacatacactcgcgggacttcatccatcgcgacatcaagccggataacttcctcatgggtcttggcaagaagggcaacctggtgtacatcattgactttggcctggccaagaaattccgcgatgcccggtcgctgaagcacattccctatcgggaaaacaagaacctcacgggcactgcccgctatgcctccatcaacacacatttgggcattgagcaatcgcgtcgtgacgacctggagtccctgggttacgtcctaatgtacttcaatctgggcgccttgccctggcagggcttaaaggcagccaacaagaggcaaaagtacgagaggatctcggagaagaagctgtccacctcgattgtggtgctgtgcaagggcttccccagcgagttcgtcaactatctgaacttctgtcgccagatgcatttcgaccagcgtcccgattactgccacctgcgcaaactcttccgcaacttgttccaccgtttgggcttcacttacgactatgtgtttgactggaacctgcttaagtttggcggacctcgcaatccccaggcgattcagcaggcgcaggacggagcggacggccaggcgggtcatgatgcggtggccgcagcagcggcggtggcagcagcggcagccgcctcctcgcatcaacagcagcagcacaaggtcaatgcggcgctgggtggcggaggaggcagtcgtgcgcaacagcaactccagggcggccaaacgctggcgatgctgggcggcaatggaggcggtaacggcagccaactgatcggcggcaacggactcaacatggacgattcgatggcggccaccaactcgtcgagaccgccgtacgacacgccggagcgtcggccctcgatacggatgcggcagggaggcggtggtggcggcggtggagtgggcgtaggcggtatgcagagcggcggagggggcggtggcgtggggaacgccaaataatattttatcgtttaggttgcgacgctggacacgacacagtagacaaacaacaacagaactcaacaaactatacatgtagtatatatagttatatatacctaatatatataatacttgctttatatatgcggt

SEQ ID NO: 199 - protein, 440 aa, Drosophila melanogaster
MELRVGNKYRLGRKIGSGSFGDIYLGTTINTGEEVAIKLECIRTKHPQLHIESKFYKTMQGGIGIPRIIWCGSEGDYNVMVMELLGPSLEDLFNFCSRRFSLKTVLLLADQMISRIDYIHSRDFIHRDIKPDNFLMGLGKKGNLVYIIDFGLAKKFRDARSLKHIPYRENKNLTGTARYASINTHLGIEQSRRDDLESLGYVLMYFNLGALPWQGLKAANKRQKYERISEKKLSTSIVVLCKGFPSEFVNYLNFCRQMHFDQRPDYCHLRKLFRNLFHRLGFTYDYVFDWNLLKFGGPRNPQAIQQAQDGADGQAGHDAVAAAAAVAAAAAASSHQQQQHKVNAALGGGGGSRAQQQLQGGQTLAMLGGNGGGNGSQLIGGNGLNMDDSMAATNSSRPPYDTPERRPSIRMRQGGGGGGGGVGVGGMQSGGGGGGVGNAK

SEQ ID NO: 200 - DNA, 2243 bp, Drosophila melanogaster
aacccccccagttactgtcgctccgccgccgcgtgaagtcagattcctccgagcgctcgaaggaatagcacgcgacattcgccggaaaaaaaacgataactataagttgtgggaaattcgcacaagggacagaaggaagaagaagaagcagcatacgaaagggacgaacggcgaagcaaaacaaatcgagcgacgaatagcggtgtgcaacgaaatgaaggtctgctgcattggcgctggttatgtcggcggtccgacctgcgcggttatggcgctcaaatgccccgatatcgtgataaccctggtggacaagagctccgagcggattgcccagtggaattcggataagttgcccatttacgagcccggcttggatgaggtggtgaagaagtgccgcaatgtgaacctcttcttctcaacggacatcgagacggccatcaaggaggcggacctcatcttcatctcggtgaacacgcccacaaaaacctgcggcaatggcaagggccgagcggcggacctcaagtacgtggagagcgcagcgcggatgatcgccgagatcgcgcagtccaacaagattgtggtggagaagagcacggtgcccgtgcgggcggcggagagcatcatgcacatattgcgagcgaaccagaagccgggcatccactacgacatactgtccaatcccgagttcctcgccgagggcaccgccatcaatgacctgctaaatgcggatcgtgtgctgatcggcggcgaggagacgcccgagggccaccaggcggtggagaagctgtcgtggatctacgagcactggatacccaagcagaacatactcacgacgaacacgtggagcagcgagctgtctaagctggcggccaacgcattcctcgcccagcgaatctccagcatcaattcgctgtcggcagtgtgcgaggccacgggcgcagatgtttccgaggtggcgagggccgtgggtctagactctcgcatcggttccaagttcctgcaggcgtcggtgggcttcggcggcagttgctttcagaaggacatcctcaatctgatttacatctgcgagaacctcaatctgcccgaggtggccgcctactggcagcaggtgatcgacatgaatgagtaccagaagcgtcgattctcgcagaaaatcatcgagagtctgttcaacacggtgtcggacaagcggatagcgatcctgggctttgccttcaagaagaatacgggcgatacgcgcgaaacagccgccattaccgtgtgccaaactctgctggaggagggcgccgcgctggatatctacgatccgaaggtggaacccgagcagatcatcgacgacctaacgcatcccagtgtcacggaatcgccggagaaggtgaagaaggcggtgcagatccacagtgatccgtacagtgcagtgcgtgccacacatgcgttggtcatctgcacggagtgggatgagtttgtcgatttggactttaagcgcatataccaatcgatgatgaagccggcctacatcttcgacggccgcaagattctcgaccacgagcgcctgcagcagatcggcttccacgtccagaccatcggcaagaagtaccagcgcaccggactgctccgctcgtggggcattgtgccgcagctttaggcgcgtcgggcggcggaggtggtggcatttacacttaaagttggcgaaatttccagtatttgcgagactaaactgtaaatatccgtattcttttctgtagctgagtgtatgttagattgggtcgattaagcttaagttgaatcatgtttaggagaatagaatcgtttcaaatcatcagaggactctgtcagttttaagtgaaaagtaaagttgaattcttgcattttgtatattagtttctaaaggatataagcttttaaaacatttctgtatataactagaaagcgaattacttatttgaacaacataaggcaatgattgattaaccacaaagttataaaacgtagtaactatttttgatcagacaatataatattatgtagctttccccatatcgacccaaactaacgaatgtgtttctaaatagttaaagtattcaactaggcacacccgcaagggaaaccctcgaaccgtatttgtattcatattcctattcccctatcgatccgccactcgaggatcggtagttgcaatattaagtcccagcaggacaataatcccctcctgcgacgggccaataaaaaccagcatttacacg

SEQ ID NO: 201 - protein, 476 aa, Drosophila melanogaster
MKVCCIGAGYVGGPTCAVMALKCPDIVITLVDKSSERIAQWNSDKLPIYEPGLDEVVKKCRNVNLFFSTDIETAIKEADLIFISVNTPTKTCGNGKGRAADLKYVESAARMIAEIAQSNKIVVEKSTVPVRAAESIMHILRANQKPGIHYDILSNPEFLAEGTAINDLLNADRVLIGGEETPEGHQAVEKLSWIYEHWIPKQNILTTNTWSSELSKLAANAFLAQRISSINSLSAVCEATGADVSEVARAVGLDSRIGSKFLQASVGFGGSCFQKDILNLIYICENLNLPEVAAYWQQVIDMNEYQKRRFSQKIIESLFNTVSDKRIAILGFAFKKNTGDTRETAAITVCQTLLEEGAALDIYDPKVEPEQIIDDLTHPSVTESPEKVKKAVQIHSDPYSAVRATHALVICTEWDEFVDLDFKRIYQSMMKPAYIFDGRKILDHERLQQIGFHVQTIGKKYQRTGLLRSWGIVPQL

SEQ ID NO: 202 - DNA, 2488 bp, Drosophila melanogaster
atgggagactcgcacgatgtctgcaggcagctgctgccgcgcgcaatcttcggcatcaatggcaaggtggagaatggagtgcgccagcatccggtcacgggatccatcatctttgcgctgggcaacaaaatcggcatcgccgactacaagaagaatacgcaggagtttgtggccggacacacgaacaccatatcgtgcctggatctcagcaagagtggcaaatacatggcctccggtcagatcaatcacatgggcttccgcggctatgtgatcatctggaattacgatcagcgcaaggagatcgctcgccacgatctgcacaaggtatctgtgcaggccatctgctttactgcccaggatagatgcgttgtgtccatcggtggcgtggatgatggttccgtaattgtcttcgacatggaggcattgtaagttgttcatatcagagctcatgcttgaactccttcaatgacttcgtttgccattacagctctcccatttgccaaacacccgcatcgagggccatctctggaaatgccttgactgtccggccgttgcacaacaatccctacttctttgtgaccgccggcgatcgccatctgcgtctgtggagcatcctgcgtgaggagaagaagctgtacgtacaggatgtcctaatggccagcaagacacgggttttctactgtgcgcgcatcaataagacggatgagtttgcctatctgggcaccggaactggggacattgtaaagatcgtgctcaactgctgcgatcgtgatcatgtgagcaaacaaggctcaaccagctgcatcctcggagccttcggcacccacaatcccaggaagccaacgggcagggactgcaatcgttatgtgaatggtgtgcgtgcactgtatgtcctggaaggcggacgtctgctgattggagcgggaaatggtgatatagagctggtggaggagcgtaccgatgtgccgctcattaactttcgcgattatcccggacccacatggccatatttgcgcaccctgaaaaagacgcacgtttcgggcagaatctcgtcctttgtgcgctcgaaaacggacatgttttacatctgcacggacaccaacgagatctatgggctgaatatcaagacttgggtgctcaagctgctgcgaacgtgccacaccaaatcggtctactgcatcacgtttcccaagtgagtttggatggaactaacccttctacttgcaatctatttgctacaattgatcatatatatgtatttaaggaactactctggtgtctttgccacgtcgggcaaggagtgcatccgcatctggtcgtctggtcgcaagcaggagctgctccgcatcatggtttacaacttcaactgcgcctgcgtgcgctttacccacgatggcactagcatagtctccgtttggaacgatggcatcattcgcgccttcactcccatcaccggtagactcatctacgccatacccaacgcgcacaacaaaggtgaactttgggaataccaatccttctaagccttcttactgaaatcctctcgttcaacacaggttgcagtgcattggccgtggcctcgtcgggtcgcttgatcgtcactggcggcatcgagggacaggtgagggtgtggaagatcgatccgtatcgccaggatctcgtcggcgtgctgaaggatcactcggggcccataacctcgctggatatcaactatctcgacaccgaagtgatctccgcctgcaccgatggctcttgtgtaatctgggacattaagtgagttaatctcagtggcaaagtatagcatgtattcctcattcaccaagtaatccccaccagacgcatgacccgcaaacaagtggtgaccgctaatacgcagttcatgtccgcatcctacttcccaactggagtgcaagtgatcacctgcggctcggacggcagaatcatctactggatggtgtacaatggagcgttgatcagggaactaactgcgtccaagaaatcgtcggtcaactgcttggccatcaacgaaacgggtgactacttcatcaccgtgggcagcgatctgcaggtgaagctgtgggactacaacagtggtgctgtggtgggcatcggatcggagcacgcctcctccgtgatcagttgtgcgtacagtccctgcatgaccatgtttgtcaccggcagcacggacggatcgctgatcatatgggatgtgccgcgtgacttctggggcaggcccaatccgccggatgtcaccaagtattcgctaccaaagacatcgtccaaaaccaggatgagtgacgtgccgtcgcgggtgaactcgggcaccaatctaaagacgaccaagggcgagaacatcgatggcctgctgaaggccactcccaaggacgatctctgctgcgtggagtgcccgccgtgcgccaaaaaggataccaagggcgtggatccctatgccgagtgcggaatcgttcccgatgtccgcaagtgctga

SEQ ID NO: 203 - protein, 742 aa, Drosophila melanogaster
MGDSHDVCRQLLPRAIFGINGKVENGVRQHPVTGSIIFALGNKIGIADYKKNTQEFVAGHTNTISCLDLSKSGKYMASGQINHMGFRGYVIIWNYDQRKEIARHDLHKVSVQAICFTAQDRCVVSIGGVDDGSVIVFDMEAFSPICQTPASRAISGNALTVRPLHNNPYFFVTAGDRHLRLWSILREEKKLYVQDVLMASKTRVFYCARINKTDEFAYLGTGTGDIVKIVLNCCDRDHVSKQGSTSCILGAFGTHNPRKPTGRDCNRYVNGVRALYVLEGGRLLIGAGNGDIELVEERTDVPLINFRDYPGPTWPYLRTLKKTHVSGRISSFVRSKTDMFYICTDTNEIYGLNIKTWVLKLLRTCHTKSVYCITFPKNYSGVFATSGKECIRIWSSGRKQELLRIMVYNFNCACVRFTHDGTSIVSVWNDGIIRAFTPITGRLIYAIPNAHNKGCSALAVASSGRLIVTGGIEGQVRVWKIDPYRQDLVGVLKDHSGPITSLDINYLDTEVISACTDGSCVIWDIKRMTRKQVVTANTQFMSASYFPTGVQVITCGSDGRIIYWMVYNGALIRELTASKKSSVNCLAINETGDYFITVGSDLQVKLWDYNSGAVVGIGSEHASSVISCAYSPCMTMFVTGSTDGSLIIWDVPRDFWGRPNPPDVTKYSLPKTSSKTRMSDVPSRVNSGTNLKTTKGENIDGLLKATPKDDLCCVECPPCAKKDTKGVDPYAECGIVPDVRKC

SEQ ID NO: 204 - DNA, 1865 bp, Drosophila melanogaster
ttcattttgtagatgggttgtgccgtgagtacagcacgcgataaggaggccatcgagcggtcgaagaacatcgatcgcgccctgcgggcggagggcgagcgggccgcctcggaggtgaaactgctgctgctgggagccggagagtcgggcaagtcaacgattgtgaaacagatgaagatcatccatgacacgggctactcgcaggaggaatgcgaggagtatcgtcgcgtcgtcttcagcaacacggtgcagagtctaatggtgatcatccgcgcaatgggacgcctgaagatcgagtttgccgatccgagccgaacggacattgcccgccagttcttcacacacgcctctgccgccgacgagggcatcctgctgcccgagatcgtgctcctgatgaagaaactctgggcagacggtggcgtacagcagacgttcgcccgatcgcgcgaatatcagttgaatgactcggcgggatactatctgaattcgctggataggatcgcgcaaccgaactacatacccacgcagcaggatgtgctacgcacgcgggtgaagaccactggcatcatcgagacacacttctcctgcaagcagctgcacttcaagtgagttgtcattaattgcccacttccggttgattcgattctaatggttatgttttttttttcgccacagacttttcgatgtgggcggccagcgatcggagcgcaaaaagtggattcattgcttcgagggcgttacggccataatcttctgcgtcgcgctatcaggtaagtcaaatattctacgaatctgaggaatctgatggcaattgttatatatttcgttaggttacgatctagttttggccgaggacgaagagatgaatcgcatgattgagtccctgaagctgttcgattccatctgcaactccaagtggtttgtggaaacatccataatactgttcctcaacaagaaggatctgtttgaggagaagatcaagagatcaccgctgacgatatgcttcccagagtacacaggtaagacaagagtgtagaaaacgattacatttttgtttaacttgatatacttttaggaaccaacaccttcgaggaggcggccaattacattcgcatgaagttcgaaaacctgaacaagcgaaaagaccaaaaggagatctacacgcatctcacctgcgccacggatacgaacaacgtgaagttcgtcttcgatgccgtcaccgatgtgatcatcaagaacaatctgaaacaaattggcttattctgagagggcggcggagcataagatcatcattatttagctggcgtcgtacgtattaaaggaaaacgcgcataaacatttccattaaacgctaagaactcgatacatttacgctcgtacgatccatatatgttttaaatgcgttacatgcttgacacacgtaattttaataaccgatttggttgccagtagtcgcggaacaaataacctaaccagctgcaatttagttaaccgtgtccattaaattgcacccataagctaactaatttaaacattagcctaaccacacaaatgtaaagttcgacaaaggacagccgatgggttttgtacatcccaaaacctcaacccgatcggctccctttggaatttagttaagtttcgcgggctaatggcggtgaccaaggggagcaccacatccagaaattcccagaggtgtctccttgggcgcaagccattttccggacgtttattctttgccaagagcttgacagcgttatttaaggtgaacctaaggcctggagttgtaagccctaaaatgtaactagtaaacttactaatatgtttagtaatagcctaaataaaagacaatttatacaaaataacca

SEQ ID NO: 205 - protein, 355 aa, Drosophila melanogaster
MGCAVSTARDKEAIERSKNIDRALRAEGERAASEVKLLLLGAGESGKSTIVKQMKIIHDTGYSQEECEEYRRVVFSNTVQSLMVIIRAMGRLKIEFADPSRTDIARQFFTHASAADEGILLPEIVLLMKKLWADGGVQQTFARSREYQLNDSAGYYLNSLDRIAQPNYIPTQQDVLRTRVKTTGIIETHFSCKQLHFKLFDVGGQRSERKKWIHCFEGVTAIIFCVALSGYDLVLAEDEEMNRMIESLKLFDSICNSKWFVETSIILFLNKKDLFEEKIKRSPLTICFPEYTGTNTFEEAANYIRMKFENLNKRKDQKEIYTHLTCATDTNNVKFVFDAVTDVIIKNNLKQIGLF

SEQ ID NO: 206 - DNA, 2031 bp, Drosophila melanogaster
attcgttgtctgaccgctcgcagcaaaagatatagaaatcgagaacgtaaacgcagaaaacacgctggattaaagtgtttcgtttcgaacatcgacagagtgagaaaacaaagtgaagtgagcgcacaaagccgaaatcaaatcaaattgaaaagccagtcaagagcaatccttaactgaacctcgcaagtaatccggtacgaccgtgtaacaaccgccaagattctactcaaggagcgtaaagcaatcatctccagaatgaagtccctgacggccgtctgccagacaggtgcctccggaatgccggccttgaatgccagcgggcgcatccagcgccatcccacgcaccgcggcgacggggagaatgccgagatgaagatgtatctgtccaaactgaaggacctcgttccgttcatgcccaagaacaggaagctcaccaagctggagatcatccagcacgtcatcgactacatctgcgacctgcagaccgagctggagacgcaccccgagatgggcaacttcgatgcggctgccgctctgacggcggtgaacggactccacgaggacgaggacagcgacatggaggatgcggatgccgaggcagaagcagaagtcgatccagatgtcctcgcccagcgcctgaatgccgagcagccggcgaaagtctctagtcccgccgcccgtctcccgcttaccgatcgccaaacgcccaacactcttgtggcgcccgcccatccgcagcagcatcagcagcagcagcaactgcaactgcagcagcaacaactgcaatcacagcagcaactgtccaacagtttagcaacgccacagaatgcggagaaagacagcagacagtcgtaagcgtggaaacacccagccgggaaaacccacggaacctataagcctattaactaaatgcataatgaaagtacagtcaaaactccactcgcaaccttcgtgtgaagatctccgcataagataacgtgtgaaactctcaagaaaaccacagcccaggcgcatctcttcaacgctccttttcccgggaaagggaaaacccgggaaaacgagacctcgcttttggctccaacagagtttagtttaaacatttaataacaagaatacaacaacacaaaacctagcattagagcagcgtaagcaagtacacattatgattattaattaaacattacaactaggatgatggcgcttaagaatgaacggaagaaagaaaacttggcaaagctttaaacaatttaattttcctttaacgcttgaaattacactgaagcatatatttttgttttcctaattttagttttgttttggtttaaacaacgcaagaaaaaatgttactaatgcaaagcaaacagagatcagcaataaaaaaaaaattataaaaatgcacaggcatcaaactttacgttgaatcaccgtttcctgcattacgattatatgatttcaatccaaatgattttcctattaattttaatcaatgaagagttttcctattattgattagccacagccaataaacaacaagaacaaccaactcagcagcacacacacattcaaattcattaatttatatcgagagagtacgtttagtgtttaagttcgagaaagttcatttccaggcactaattttcactcacaccactcacatagaaaaacacaaacacctcattttgtagttttccgagtcccttggatcgttttcctcttttttaatcgaaataacgcataatgcataataattataaccagatatacactaaaacctataaatatatattaatatatgttctgtgatctgtagcatactttgtacaaagtgttttttagcataattatgcgattttaattatgatccgcaatcgaaattacacatttttgttctcatttcgatggtaaaaacactctatcatgatgtaaaaaaaaaaaacaaaagaaaacatttgatgatgttgcgaaaaaatatattatctaaaacataaagaaaaacaaacactagctcttaataaattgcaaaaattt

SEQ ID NO: 207 - protein, 199 aa, Drosophila melanogaster
MKSLTAVCQTGASGMPALNASGRIQRHPTHRGDGENAEMKMYLSKLKDLVPFMPKNRKLTKLEIIQHVIDYICDLQTELETHPEMGNFDAAAALTAVNGLHEDEDSDMEDADAEAEAEVDPDVLAQRLNAEQPAKVSSPAARLPLTDRQTPNTLVAPAHPQQHQQQQQLQLQQQQLQSQQQLSNSLATPQNAEKDSRQS

SEQ ID NO: 208 - DNA, 2290 bp, Drosophila melanogaster
ggcacgagagagagagagagagagagagagagagagagagactcgtgccgaattcggcacgagcatttttgctggatctaccattttattttagttaataaaatacatatatttcctctctttttgttccgtttgtgcgcgtacaaaactagctgcgaactcgtgcaatatttcataaactgaatgggaaaacaacgataacgacgaaagaaaacgaaaacggatcttgcgacgaaattttccccgttccgtttttttttctccaccagcagcagaagcagcagagcaaaagcagcgaatatatttgtaaaagagagccccaaccttgagaaaaaacaaccagcagggcaataattagttgaatttatcgtctgctgtttttcaagtgaacgcgtccaactgtttttgaagcgaagcgcttaggcggaggagcagctagccaggatggacaagatgcggatattgaaggaaagtcgccccgagataatcgtcggtggcaaatatcgggtgatcaggaagattggaagcggatcgtttggcgacatttacctgggcatgagcatccagagcggcgaagaagtggccatcaagatggagagcgcccacgcccgccatccgcagctgttgtacgaggccaagctgtaccgcattctgagcggcggcgttggattccctcgtatacgtcaccatggcaaggaaaagaacttcaacaccctggtcatggacctgctgggaccctcgcttgaggatctgttcaatttctgtacgcgccatttcacaatcaagacggttctgatgctcgtcgaccagatgatcggacgcttggagtacatccatctcaagtgcttcatccatcgcgacatcaagccggataacttcctaatgggcattggtcggcactgcaataagctgttcctgatcgatttcggtctggccaagaagttccgcgatccgcacacgcgccatcacatcgtttaccgcgaggacaagaacctcaccggcactgcccgctatgcctcgatcaatgcccatctgggcatcgagcagtcgcggcgtgacgacatggaatcgcttggatacgtgatgatgtacttcaatcgcggcgtactgccatggcaaggcatgaaggccaacaccaagcagcagaaatacgagaagatctccgaaaagaagatgtccacgcccatcgaggtcctctgcaagggctcgccggccgagttctccatgtatctgaactattgtcgtagcctgcgcttcgaggagcagccagattacatgtacctacgtcaattgttccgcatactgttcagaacgctgaaccatcagtatgactacatctacgactggacaatgctgaagcagaagacccatcagggtcaacccaatccagctatactcttggagcaattggacaaggacaaggagaagcagaacggcaagcccctgatcgcggactaagagctgcagcgcattcagacgaatggggggagtgcatcagagaaggagaacgtggatgcgtggatgtaaatgacgttgatgtgggcgaaaggcccggcaaggagcggagcaaatatgaaacagacgcaaccgtaaaattgagtaacaccagcggtcgtccgaatgtttcttaatattaatttaaattcaatactaaacaaataaggaaccacaaacaagcaagcaacggcatcatcagcagggcatataaaatgataccccagcaaatgtgattcacgagtgaatcactgcgatcgataataacataaaccgaaattattgcaaatcaatacgatttaaactaatttgcaatccatacacaaatcaacatacttgcataacacacccacacacacacatacatacacacactcacccactctcatccacccactcaaaaagcaaacatcattgcccaaaagggggagaaaaaagaaaagaagagagaagaagaaaagaagaggaaagaaatcaacaacacttagcctaataaattacaagaaataatattggtagagttggaggaacaaaatgaagtaatgctgaggaaactaaacctatatatatatgtatatgtatatatgtaagcgaataaacacaacaccatatatgtatgcatatacccatttgattcacgtcaaatcgaatccaatgcttaattatgaatcgagcgaaacaaaactcaataactaattaaaatggaataaataagaaacaaaacagcaacaagcaaacaacaacacaaaaaaacaacaaacaaataagaataaacaataaaaaaaaaaaaaaaaaa

SEQ ID NO: 209 - protein, 337 aa, Drosophila melanogaster
MDKMRILKESRPEIIVGGKYRVIRKIGSGSFGDIYLGMSIQSGEEVAIKMESAHARHPQLLYEAKLYRILSGGVGFPRIRHHGKEKNFNTLVMDLLGPSLEDLFNFCTRHFTIKTVLMLVDQMIGRLEYIHLKCFIHRDIKPDNFLMGIGRHCNKLFLIDFGLAKKFRDPHTRHHIVYREDKNLTGTARYASINAHLGIEQSRRDDMESLGYVMMYFNRGVLPWQGMKANTKQQKYEKISEKKMSTPIEVLCKGSPAEFSMYLNYCRSLRFEEQPDYMYLRQLFRILFRTLNHQYDYIYDWTMLKQKTHQGQPNPAILLEQLDKDKEKQNGKPLIAD

SEQ ID NO: 210 - DNA, 5970 bp, Drosophila melanogaster
acttactagtgaaaaacatgataataaacaacttgccaaaaaaaatccaatgaaattgacacttatgttaaaaaaataggtgagattgtaaccgttgatgtacacttacgaagtacgtaacaagttcatgaactgatttcgtgagcaggtctctccataatcgccgtatctgtgggatcgcgcgctcctgctcgcactcgctgggtggatggcagcacatgttcgaagtgcgagagagtgcaaagcggagagcgccgacgtcgacgccgaaaaaactgaacaagatccgccgcgaatgttgattttcctttcattgactaactgccactcgcagcgcgcagatcgtcggctccgcttgttccgttccgttcgtttcgtttcgtttcgttcgatctacttcgagtcgcgagttttaagcagtgtagtgagtgccccgtgaaaaggataacccaaaaagtgatttctactattttccaatagtttttatcagtgtgaagaaaacatgtaaacttggctcaaaaagggctttaaaagatacaaagcttcaatgcgaaggataaaataatatcgcaccagtgcttcaaaaaccaaaactatgcctaaggctggaaatttaaattaaaatttttttaataaatattccaaaaatattgcccctgaaaagtgttgataaacccccaaccgagcaaaatgttaatgtccgcggacagttcagatagcgccaagacttctgtgatctgcagcacggtgagtgccagcatgctagcaccaccagctccagaacagcccagcaccacagcaccacccattttgggggtaacaggtcgatctcacctggaaaatgccctgaaactaccgccaaacacaagtgtttcggcttactaccagcacaacagcaagctgggcatgggccagaattacaatccggaattcaggagcctggtagcacctgtcacagatctggatactgtgccacccacaggtgtgaccatggcgagttcttcgaattctcccaactcctccgtcaagctgccccacagcggcgtgatctttgtcagcaaatcgagtgccgtcagcaccaccgatggtcccactgcagtgttgcaacagcagcagccgcagcagcaaatgccccagcacttcgagtccctgccccaccaccacccccagcaggaacaccagccacagcagcagcagcaacaacatcaccttcagcaccacccacatccacatgtgatgtatccgcacggatatcagcaggccaatctgcaccactcgggtggtattgctgtggttccggcggattcgcgtccccagactcccgagtacatcaagtcctacccagttatggatacaactgtggctagttcggtaaagggggaaccagaactcaacatagaattcgatggcaccacagtgctgtgccgcgtttgcggggataaggcctccggtttccattacggcgtgcattcctgcgagggttgcaagggattcttccgccgctccatccagcaaaagatccagtatcgcccgtgcaccaagaatcagcagtgcagcattctgcgcatcaatcgcaatcgttgtcaatattgccgcctgaaaaagtgcattgccgtgggcatgagtcgcgatgctgtgcgttttggacgcgtgccgaagcgcgaaaaggcgcgtatcctggcggccatgcaacagagcacccagaatcgcggccagcagcgagccctcgccaccgagctggatgaccagccacgcctcctcgccgccgtgctgcgcgcccacctcgagacctgtgagttcaccaaggagaaggtctcggcgatgcggcagcgggcgcgggattgcccctcctactccatgcccacacttctggcctgtccgctgaaccccgcccctgaactgcaatcggagcaggagttctcgcagcgtttcgcccacgtaattcgcggcgtgatcgactttgccggcatgattcccggcttccagctgctcacccaggacgataagttcacgctcctgaaggcgggactcttcgacgccctgtttgtgcgcctgatctgcatgtttgactcgtcgataaactcaatcatctgtctaaatggccaggtgatgcgacgggatgcgatccagaacggagccaatgcccgcttcctggtggactccaccttcaatttcgcggagcgcatgaactcgatgaacctgacagatgccgagataggcctgttctgcgccatcgttctgattacgccggatcgccccggtttgcgcaacctggagctgatcgagaagatgtactcgcgactcaagggctgcctgcagtacattgtcgcccagaataggcccgatcagcccgagttcctggccaagttgctggagacgatgcccgatctgcgcaccctgagcaccctgcacaccgagaaactggtagttttccgcaccgagcacaaggagctgctgcgccagcagatgtggtccatggaggacggcaacaacagcgatggccagcagaacaagtcgccctcgggcagctgggcggatgccatggacgtggaggcggccaagagtccgcttggctcggtatcgagcactgagtccgccgacctggactacggcagtccgagcagttcgcagccacagggcgtgtctctgccctcgccgcctcagcaacagccctcggctctggccagctcggctcctctgctggcggccaccctctccggaggatgtcccctgcgcaaccgggccaattccggctccagcggtgactccggagcagctgagatggatatcgttggctcgcacgcacatctcacccagaacgggctgacaatcacgccgattgtgcgacaccagcagcagcaacaacagcagcagcagatcggaatactcaataatgcgcattcccgcaacttgaatgggggacacgcgatgtgccagcaacagcagcagcacccacaactgcaccaccacttgacagccggagctgcccgctacagaaagctagattcgcccacggattcgggcattgagtcgggcaacgagaagaacgagtgcaaggcggtgagttcggggggaagttcctcgtgctccagtccgcgttccagtgtggatgatgcgctggactgcagcgatgccgccgccaatcacaatcaggtggtgcagcatccgcagctgagtgtggtgtccgtgtcaccagttcgctcgccccagccctccaccagcagccatctgaagcgacagattgtggaggatatgcccgtgctgaagcgcgtgctgcaggctccccctctgtacgataccaactcgctgatggacgaggcctacaagccgcacaagaaattccgggccctgcggcatcgcgagttcgagaccgccgaggcggatgccagcagttccacttccggctcgaacagcctgagtgccggcagtccgcggcagagcccagtcccgaacagtgtggccacgcccccgccatcggcggccagcgccgccgcaggtaatcccgcccagagccagctgcacatgcacctgacccgcagcagccccaaggcctcgatggccagctcgcactcggtgctggccaagtctctcatggccgagccgcgcatgacgcccgagcagatgaagcgcagcgatattatccaaaactacttgaagcgcgagaacagcacagcagccagcagcaccaccaatggcgtgggcaaccgcagtcccagcagcagctccacaccgccgccgtcggcggtccagaatcagcagcgttggggcagcagctcggtgatcaccaccacctgccagcagcgccagcagtccgtgtcgccgcacagcaacggttccagctccagttcgagctctagctccagctccagttcgtcatcctcctccacatcctccaactgcagctccagctcggccagcagctgccagtatttccagtcgccgcactccaccagcaacggcaccagtgcaccggcgagctccagttcgggatcgaacagcgccacgcccctgctggaactgcaggtggacattgctgactcggcgcagcctctcaatttgtccaagaaatcgcccacgccgccgcccagcaagctgcacgctctggtggccgccgccaatgccgttcaaaggtatcccacattgtccgccgacgtcacagtgacagcctccaatggcgggtcctccgtcggcggcggcgagtccggccgccagcagcagtccgccggcgagtgtgggctcccccaatccgggcctgagcgccgccgtgcacaaggtaatgctggaggcgtaagagcgggaggaggtaggtggttttacgcggagaagtgggagagacagagactgggagtggcagttcagcgaagcaggaagcaggatcacttggagcggcgggagttgaattaaattattttaccatttaattgagacgtgtacaaagtttgaaagcaaaaccaacatgcatgcaatttaaaactaatatttaaagcaacaacaaacaaaacaactacaagttattaatttaaaaaacaaacaaacaaacaaacaacaaaaaacccaagcttgaatggtattacaaaagaaaaagaaaaacagaaaaaatataaatatattttagcagttaaactttaacgtagcaagaaaccaacaaacccaaggcagcgctctgatttcgcattaacttttcttcagctgctaccgaaaacgcccctcacctcccccccacccaacccttcctccacacaccaaccgtctttcgacccctgattgttttataagttttaagctcttgttgtacatattaattacgtttattggtaactatgtttagcgctttagttgtagttggagcaaaactactttgcttttttggatgttttttgaaaaaactgcaaattattattattaaatttttaaatacctaaaaacaaaacaatgtgtgtgaaattttttattgtgcgatctccaagcagaatgaagtgcagtttgcaacaaattttaactacgattaagttgataacgattcattttttatgaatttaactaattttatgaatttgttatagttttccacccttctatagatctttctatctgatcatctagctacccgtattcctgatttctcctttggcacaaagctcttctctatgctaaagaatcaagtggaataaatattgttttctaattttaaaactaccacaaaaatacgattaaaatatacacgaagtaattgaaaatcaaacaaaatgcttaaagttttagcagcaagcagtaaaacgacgatgaagaagagaaacccaacgttaaatatatctgttgtgtacatagttaaatgttaaattaaacacaaaaacatatttaaagtacatataaatacacataattattaatgaagaaacctatgcttaaaagattcaatgtttgattggcatcttagaaaaccaagcgaaaaatacaaaaaaaaatcaacaaacaaaaattatgatatattatttaaaagtaaagtatacatttacattacagaaaaacaaaagagaaaacttgcggtagcaacaaaactattatattaattacattttaattatgctgtactattatgattattaattattatgattaattaattacgatttttatgcttagacaaaccaacaaaaaacaaatatgcaaaaaccattaaaaaaaaaaacaaaaaacaagcaaaaaattacactggcgcagaaatttgtattgtcaaatcaagaaaaaatttgtttaaaaatttcaaaagaaagcctcttaagttttttcatttcaatttccttttcagttgaacactttttcttaaaatgttcagttttaccgttactttgctttggagtggtaagattttgggtttcacttgatttcattttcgttttgactatcgtgctgtaaaaatatttactaaattatatcgaaagtatttatatcataattaaataaacaaga

SEQ ID NO: 211 - protein, 1237 aa, Drosophila melanogaster
MLMSADSSDSAKTSVICSTVSASMLAPPAPEQPSTTAPPILGVTGRSHLENALKLPPNTSVSAYYQHNSKLGMGQNYNPEFRSLVAPVTDLDTVPPTGVTMASSSNSPNSSVKLPHSGVIFVSKSSAVSTTDGPTAVLQQQQPQQQMPQHFESLPHHHPQQEHQPQQQQQQHHLQHHPHPHVMYPHGYQQANLHHSGGIAVVPADSRPQTPEYIKSYPVMDTTVASSVKGEPELNIEFDGTTVLCRVCGDKASGFHYGVHSCEGCKGFFRRSIQQKIQYRPCTKNQQCSILRINRNRCQYCRLKKCIAVGMSRDAVRFGRVPKREKARILAAMQQSTQNRGQQRALATELDDQPRLLAAVLRAHLETCEFTKEKVSAMRQRARDCPSYSMPTLLACPLNPAPELQSEQEFSQRFAHVIRGVIDFAGMIPGFQLLTQDDKFTLLKAGLFDALFVRLICMFDSSINSIICLNGQVMRRDAIQNGANARFLVDSTFNFAERMNSMNLTDAEIGLFCAIVLITPDRPGLRNLELIEKMYSRLKGCLQYIVAQNRPDQPEFLAKLLETMPDLRTLSTLHTEKLVVFRTEHKELLRQQMWSMEDGNNSDGQQNKSPSGSWADAMDVEAAKSPLGSVSSTESADLDYGSPSSSQPQGVSLPSPPQQQPSALASSAPLLAATLSGGCPLRNRANSGSSGDSGAAEMDIVGSHAHLTQNGLTITPIVRHQQQQQQQQQIGILNNAHSRNLNGGHAMCQQQQQHPQLHHHLTAGAARYRKLDSPTDSGIESGNEKNECKAVSSGGSSSCSSPRSSVDDALDCSDAAANHNQVVQHPQLSVVSVSPVRSPQPSTSSHLKRQIVEDMPVLKRVLQAPPLYDTNSLMDEAYKPHKKFRALRHREFETAEADASSSTSGSNSLSAGSPRQSPVPNSVATPPPSAASAAAGNPAQSQLHMHLTRSSPKASMASSHSVLAKSLMAEPRMTPEQMKRSDIIQNYLKRENSTAASSTTNGVGNRSPSSSSTPPPSAVQNQQRWGSSSVITTTCQQRQQSVSPHSNGSSSSSSSSSSSSSSSSSTSSNCSSSSASSCQYFQSPHSTSNGTSAPASSSSGSNSATPLLELQVDIADSAQPLNLSKKSPTPPPSKLHALVAAANAVQRYPTLSADVTVTASNGGSSVGGGESGRQQQSAGECGLPQSGPERRRAQGNAGGVRAGGGRWFYAEKWERQRLGVAVQRSRKQDHLERRELN

SEQ ID NO: 212 - DNA, 6282 bp, Drosophila melanogaster
cgacgcgtttggagtgaacgtcctcagttggcacacaaaaacaaaaacacaaaacgacagcaacaacatcggtggggggagtacgagcgggatgggggtaatggggggcaccgggggagtggaggccgagagagcgagagagcgacccgaagcaacacaacaccaacacgaggcccaaaaagacacttcggctgggttcagctcgtgttgctctgggtcgttttgtattgctggtggacgctgctttcattcgcaaattgctcgtcgttggcagcggttgtgcagagcaagaaaagcgcgcgaaaaaccaagcaaaaaattaatacagctggatcaagcgaaagagatagagagcagagtcaacagcaacaaatgttcaatagcaaatgatatcgcatatttttgttggtgccagtgaagtgagatcaaagtgaagtgtgcaatgttccttattagcaaatcgtagagcaaccaacaatcgagagttcaagtgtcatttcgaagccaaaaagcaaaatctctaattcaaatatggtttgtgcaatgcaagaggttgctgctgtgcagcatcagcagcagcaacagcaactccagttgccccagcagcaacagcagcagcagcagacaacacagcagcaacatgcaacaacgatagtgctgctgacgggcaatggcggcggtaatctgcacattgtcgccacaccgcaacagcatcagccgatgcatcagctccaccatcagcatcagcatcagcatcagcaccagcagcaggccaagagccaacagctgaagcaacaacactcggcgctggtcaagttgctggagtcggcgcccatcaagcagcaacagcagacgcccaagcaaattgtttacctgcagcagcagcagcagcaaccgcaacgcaaaagactgaaaaacgaagcagcaatcgtacaacagcaacaacaaacacctgcaacactagtaaagacaacaaccaccagcaacagcaacagcaacaacacccagacaacaaatagtattagtcagcagcaacagcagcatcagattgtgttgcagcaccagcagccagccgcggcagcaacaccaaagccatgtgccgatctgagcgccaaaaatgacagcgagtcgggcatcgacgaggactgccccaacagcgatgaggattgccccaatgccaacccggcgggcacatcgctcgaggacagcagctacgagcagtatcagtgcccctggaagaagatacgctatgcgcgtgagctcctcaagcagcgcgagttggagcagcagcagaccaccggaggcagcaacgcgcagcagcaagtcgaggcgaagccagctgcaatacccaccagcaacatcaagcagctgcactgtgatagtcccttttcggcgcagacccacaaggaaatcgccaatctcctgcgccaacagtcccagcaacaacaggttgtggccacgcagcagcagcagcaacagcagcagcagcaccagcaccagcaacaacgaagggatagctccgacagcaactgctcgctgatgagcaactcgagcaactccagtgcgggcaattgttgcacctgcaacgctggcgacgaccagcagctggaggagatggacgaggcccacgattcgggctgcgacgatgaactttgcgagcagcatcaccagcgactggactcctcccaactgaattacctgtgccagaagttcgatgagaaactggacacggcgctgagcaacagcagcgccaacacggggaggaacacgccagctgtaacagctaacgaagatgccgatggattcttccgccgctccatccagcaaaagatccagtatcgcccgtgcaccaagaatcagcagtgcagcattctgcgcatcaatcgcaatcgttgtcaatattgccgcctgaaaaagtgcattgccgtgggcatgagtcgcgatgctgtgcgttttggacgcgtgccgaagcgcgaaaaggcgcgtatcctggcggccatgcaacagagcacccagaatcgcggccagcagcgagccctcgccaccgagctggatgaccagccacgcctcctcgccgccgtgctgcgcgcccacctcgagacctgtgagttcaccaaggagaaggtctcggcgatgcggcagcgggcgcgggattgcccctcctactccatgcccacacttctggcctgtccgctgaaccccgcccctgaactgcaatcggagcaggagttctcgcagcgtttcgcccacgtaattcgcggcgtgatcgactttgccggcatgattcccggcttccagctgctcacccaggacgataagttcacgctcctgaaggcgggactcttcgacgccctgtttgtgcgcctgatctgcatgtttgactcgtcgataaactcaatcatctgtctaaatggccaggtgatgcgacgggatgcgatccagaacggagccaatgcccgcttcctggtggactccaccttcaatttcgcggagcgcatgaactcgatgaacctgacagatgccgagataggcctgttctgcgccatcgttctgattacgccggatcgccccggtttgcgcaacctggagctgatcgagaagatgtactcgcgactcaagggctgcctgcagtacattgtcgcccagaataggcccgatcagcccgagttcctggccaagttgctggagacgatgcccgatctgcgcaccctgagcaccctgcacaccgagaaactggtagttttccgcaccgagcacaaggagctgctgcgccagcagatgtggtccatggaggacggcaacaacagcgatggccagcagaacaagtcgccctcgggcagctgggcggatgccatggacgtggaggcggccaagagtccgcttggctcggtatcgagcactgagtccgccgacctggactacggcagtccgagcagttcgcagccacagggcgtgtctctgccctcgccgcctcagcaacagccctcggctctggccagctcggctcctctgctggcggccaccctctccggaggatgtcccctgcgcaaccgggccaattccggctccagcggtgactccggagcagctgagatggatatcgttggctcgcacgcacatctcacccagaacgggctgacaatcacgccgattgtgcgacaccagcagcagcaacaacagcagcagcagatcggaatactcaataatgcgcattcccgcaacttgaatgggggacacgcgatgtgccagcaacagcagcagcacccacaactgcaccaccacttgacagccggagctgcccgctacagaaagctagattcgcccacggattcgggcattgagtcgggcaacgagaagaacgagtgcaaggcggtgagttcggggggaagttcctcgtgctccagtccgcgttccagtgtggatgatgcgctggactgcagcgatgccgccgccaatcacaatcaggtggtgcagcatccgcagctgagtgtggtgtccgtgtcaccagttcgctcgccccagccctccaccagcagccatctgaagcgacagattgtggaggatatgcccgtgctgaagcgcgtgctgcaggctccccctctgtacgataccaactcgctgatggacgaggcctacaagccgcacaagaaattccgggccctgcggcatcgcgagttcgagaccgccgaggcggatgccagcagttccacttccggctcgaacagcctgagtgccggcagtccgcggcagagcccagtcccgaacagtgtggccacgcccccgccatcggcggccagcgccgccgcaggtaatcccgcccagagccagctgcacatgcacctgacccgcagcagccccaaggcctcgatggccagctcgcactcggtgctggccaagtctctcatggccgagccgcgcatgacgcccgagcagatgaagcgcagcgatattatccaaaactacttgaagcgcgagaacagcacagcagccagcagcaccaccaatggcgtgggcaaccgcagtcccagcagcagctccacaccgccgccgtcggcggtccagaatcagcagcgttggggcagcagctcggtgatcaccaccacctgccagcagcgccagcagtccgtgtcgccgcacagcaacggttccagctccagttcgagctctagctccagctccagttcgtcatcctcctccacatcctccaactgcagctccagctcggccagcagctgccagtatttccagtcgccgcactccaccagcaacggcaccagtgcaccggcgagctccagttcgggatcgaacagcgccacgcccctgctggaactgcaggtggacattgctgactcggcgcagcctctcaatttgtccaagaaatcgcccacgccgccgcccagcaagctgcacgctctggtggccgccgccaatgccgttcaaaggtatcccacattgtccgccgacgtcacagtgacagcctccaatggcgggtcctccgtcggcggcggcgagtccggccgccagcagcagtccgccggcgagtgtgggctcccccaatccgggcctgagcgccgccgtgcacaaggtaatgctggaggcgtaagagcgggaggaggtaggtggttttacgcggagaagtgggagagacagagactgggagtggcagttcagcgaagcaggaagcaggatcacttggagcggcgggagttgaattaaattattttaccatttaattgagacgtgtacaaagtttgaaagcaaaaccaacatgcatgcaatttaaaactaatatttaaagcaacaacaaacaaaacaactacaagttattaatttaaaaaacaaacaaacaaacaaacaacaaaaaacccaagcttgaatggtattacaaaagaaaaagaaaaacagaaaaaatataaatatattttagcagttaaactttaacgtagcaagaaaccaacaaacccaaggcagcgctctgatttcgcattaacttttcttcagctgctaccgaaaacgcccctcacctcccccccacccaacccttcctccacacaccaaccgtctttcgacccctgattgttttataagttttaagctcttgttgtacatattaattacgtttattggtaactatgtttagcgctttagttgtagttggagcaaaactactttgcttttttggatgttttttgaaaaaactgcaaattattattattaaatttttaaatacctaaaaacaaaacaatgtgtgtgaaattttttattgtgcgatctccaagcagaatgaagtgcagtttgcaacaaattttaactacgattaagttgataacgattcattttttatgaatttaactaattttatgaatttgttatagttttccacccttctatagatctttctatctgatcatctagctacccgtattcctgatttctcctttggcacaaagctcttctctatgctaaagaatcaagtggaataaatattgttttctaattttaaaactaccacaaaaatacgattaaaatatacacgaagtaattgaaaatcaaacaaaatgcttaaagttttagcagcaagcagtaaaacgacgatgaagaagagaaacccaacgttaaatatatctgttgtgtacatagttaaatgttaaattaaacacaaaaacatatttaaagtacatataaatacacataattattaatgaagaaacctatgcttaaaagattcaatgtttgattggcatcttagaaaaccaagcgaaaaatacaaaaaaaaatcaacaaacaaaaattatgatatattatttaaaagtaaagtatacatttacattacagaaaaacaaaagagaaaacttgcggtagcaacaaaactattatattaattacattttaattatgctgtactattatgattattaattattatgattaattaattacgatttttatgcttagacaaaccaacaaaaaacaaatatgcaaaaaccattaaaaaaaaaaacaaaaaacaagcaaaaaattacactggcgcagaaatttgtattgtcaaatcaagaaaaaatttgtttaaaaatttcaaaagaaagcctcttaagttttttcatttcaatttccttttcagttgaacactttttcttaaaatgttcagttttaccgttactttgctttggagtggtaagattttgggtttcacttgatttcattttcgttttgactatcgtgctgtaaaaatatttactaaattatatcgaaagtatttatatcataattaaataaacaaga

SEQ ID NO: 213 - protein, 1394 aa, Drosophila melanogaster
MVCAMQEVAAVQHQQQQQQLQLPQQQQQQQQTTQQQHATTIVLLTGNGGGNLHIVATPQQHQPMHQLHHQHQHQHQHQQQAKSQQLKQQHSALVKLLESAPIKQQQQTPKQIVYLQQQQQQPQRKRLKNEAAIVQQQQQTPATLVKTTTTSNSNSNNTQTTNSISQQQQQHQIVLQHQQPAAAATPKPCADLSAKNDSESGIDEDCPNSDEDCPNANPAGTSLEDSSYEQYQCPWKKIRYARELLKQRELEQQQTTGGSNAQQQVEAKPAAIPTSNIKQLHCDSPFSAQTHKEIANLLRQQSQQQQVVATQQQQQQQQQHQHQQQRRDSSDSNCSLMSNSSNSSAGNCCTCNAGDDQQLEEMDEAHDSGCDDELCEQHHQRLDSSQLNYLCQKFDEKLDTALSNSSANTGRNTPAVTANEDADGFFRRSIQQKIQYRPCTKNQQCSILRINRNRCQYCRLKKCIAVGMSRDAVRFGRVPKREKARILAAMQQSTQNRGQQRALATELDDQPRLLAAVLRAHLETCEFTKEKVSAMRQRARDCPSYSMPTLLACPLNPAPELQSEQEFSQRFAHVIRGVIDFAGMIPGFQLLTQDDKFTLLKAGLFDALFVRLICMFDSSINSIICLNGQVMRRDAIQNGANARFLVDSTFNFAERMNSMNLTDAEIGLFCAIVLITPDRPGLRNLELIEKMYSRLKGCLQYIVAQNRPDQPEFLAKLLETMPDLRTLSTLHTEKLVVFRTEHKELLRQQMWSMEDGNNSDGQQNKSPSGSWADAMDVEAAKSPLGSVSSTESADLDYGSPSSSQPQGVSLPSPPQQQPSALASSAPLLAATLSGGCPLRNRANSGSSGDSGAAEMDIVGSHAHLTQNGLTITPIVRHQQQQQQQQQIGILNNAHSRNLNGGHAMCQQQQQHPQLHHHLTAGAARYRKLDSPTDSGIESGNEKNECKAVSSGGSSSCSSPRSSVDDALDCSDAAANHNQVVQHPQLSVVSVSPVRSPQPSTSSHLKRQIVEDMPVLKRVLQAPPLYDTNSLMDEAYKPHKKFRALRHREFETAEADASSSTSGSNSLSAGSPRQSPVPNSVATPPPSAASAAAGNPAQSQLHMHLTRSSPKASMASSHSVLAKSLMAEPRMTPEQMKRSDIIQNYLKRENSTAASSTTNGVGNRSPSSSSTPPPSAVQNQQRWGSSSVITTTCQQRQQSVSPHSNGSSSSSSSSSSSSSSSSSTSSNCSSSSASSCQYFQSPHSTSNGTSAPASSSSGSNSATPLLELQVDIADSAQPLNLSKKSPTPPPSKLHALVAAANAVQRYPTLSADVTVTASNGGSSVGGGESGRQQQSAGECGLPQSGPERRRAQGNAGGVRAGGGRWFYAEKWERQRLGVAVQRSRKQDHLERRELN

SEQ ID NO: 214 - DNA, 8739 bp, Drosophila melanogaster
gaattctagcgcgtgaaaattgaaaattacttttattggtgtaatcaaggaacgcacttgaactagcttaatcgttgttaatcgttgtcactgcccgatccgctgccggaaccactgccactgccgcttccactggcagacttgctgctgccgccgccgctcttctggctgccctcgttttcgctaccactagcgctgcccccttctccgccgctcttgttgctgtggccgctcttggcgctgccggcgtccgattcgctgtcggagtcgcgcagtgccttgctggccttggccttgtccaccttcttgctgcgacgcgcctcgaagtcggagccctcgtcttcgtccgacgagtagatcgtagatgccttaacctcccgctggccggcaccagagcccttcttataccggttcttgatggcactcaggctgatggcgttctcatcgtcgctgccttcgtcgtgctggtaagacgaagtgccgcctccaatcagtggttcgcccgcgcctggtttctttttcttgggcagcgacttgtgctgattgcgcatcgcctggcgcagcttggcctcctcctccctgagctgcgttggcctatccgtggtgggatccttgcccacctgcgtaagaatcttaatgccactggtcttgctggatcgatcggccagcgacatggtcatcttcttgtgcgtaaaggactccgtggaatgaggacggaaagtgagcttggtcctgaagaccgactggccctgcagacccgttccttggcggacgaacagatgattgtggtcacctaacagcggctgcctgtaggcgtcgaagatctcgttgcccaggtgaagggacatgctgccgtcggaccagcgcacgaatcgcgcattagactcgcgcaccatgtcgcccttattgttcatgtactctcgccatcggatagtgttgctcactttgagcttgatacgctgtctgccctcctcgtccattgtctcctcttcgtcgatctcgtcttcgtaggtttccggatcaaacggatgcgtgaccactgacaaaaagttgggaagcttgataaagtgctgctcttttcccaggtctgcagagatgcgcggaatctccacatcgattcgggtctccggaagcggttcaggctcatcctccttgggcgccgattctacttggctctcgactttatcccgggatcgcgatctggagcgggaacgcgagtggctcatagaacgactgtgggagtgggacttgctttgactgcggctcttggagcgcactggggattttctggcagctggtccagcctcatcctcatcgtcacttatatcaccggcatctccaaatatgtcagctgcagccggagctttctttccctgcataattgaaatgtacatatatcagggtaatttttccttaattatagaactagataaataacaatatagttgagtagttcagagtggtgtgccttaccacatcctgattggaatcgctatcagtgtcgatcagccgtgacttcttagctttggtgggcgattcctcaatgtcgctatcgctgccgctctttttcttctcttgatcggagccactcgccttgcgtgccttcttcttgggcacacccacatcgctgccggagccggatgcgctgccactacgacttctattgggcgacggcgtgcccgtcttggaacgcgatctggaagtgcgactgccactcctgctcctacttctgctgcgactgccgctcttggaattggcacgctctacgtcaatttgcagattgggcgaattagaccgcgattcctcgttgcccttgagtgaaccgctatgagacctcgatcgagactcagagcggtcactttgtgccgaaccagatttgcgactccgagcggatcccgatctgcgactgtgggccgaaccggatctgcggctgtgagtagatcccgatttgcgactttggggagaaccagatctacgactctgaggcgatcctgacttgcgactttgcaacgaacctgatctgtgactttgtggagattccggagttccagatttacgcgtacgcgcagatcccgacctgcgactgtgagcagatcttgatctcttactacgagcggacgcagacagctgcgagtggcggctttctgcagacccggacctggcactacgcggagacccagagccggaccgggatcgggaagacctggagcccgatcgggaacgatcgctgccactacccgacctgcgactgcgttgggatctggaaaacgaggggaaggtaatcagcactctcccgccgccgtgtttgaatatcaaatagttacccgggcgcactacctccttgcggcgtgacactgcggcttccacttcgactcgaaccggatgaacctacatacatatgtgaacagtgtaaatattagttactcaggcctggacttagccattagccactcaccactgtcgtcgtccgagttttggctgcccataatgccaagtaaattttgtttaaaatcggaaaatctgcaatcaagacaattcgcggccgggcaataaagttgagtttaggaggtctaggcactgtcacagtaatcgataactgaaatacgcaaagaggtcttcgcatagacgccccagatggcagcccaataactgtttttgtctatcgattaaaagtaaacaactattttaccaatcgcaaaggcgaataaaattgttgtctttaaagaaaacaattcgaatattctttgaaatatacagtaatcaatgcaccaaaccctctcgttgcaaactaactactatcgataccaacgctgtctcgatagcagatttttacatccctaattcttgtgtgtttgtattcgtgacagccacaaagttttttgcggaacattttttgtgtacaatttaaagccatttcgggcgctaaagaattgtttactgcccctcgatagtggatcgtaaggacccggctccattaagttcgagtgcatttgcgggtcggcggcgtaaaagacgcgcaaatctagcagggaatttgcccaattcgctgcttcgggtgaaatttcaatgaactgagaaaacaaagacagacacacacacaaacacacgcacagggtcacagacacagtgcttgtgcagcagtgtagtaagaagcagagacaacagcgcaatagcgagcgattatttacttacaaataaaatacaaaacggaaacattaacaaaaagcgagagccctggccaatccaatcggccgagtgtaacgtgcgcgacatttgcataagcgtgaatatagaaactacagtggtcgcaagagcggcgcagaaaaaacggacaacttttagcctccgccaggcatcaacatccttcgactctcctctcctctctctctctctctcgctcgctgtctcttcggcacgaagaccacgctgcatacagacgaggcacatatacatatgcacacagccacagcggtatatatgccatttatttagggacgactcggcgcggaaaagtactaactaacctcgttcccgctcctacacccgctacggttccagctcccgtttctccgttgcatcctttcagcttccagcgagtgagtgctagtgaccgagacacccacagctaaccaacagctgcccagtgggagttagcggactttcatattcctgctgattcgccgatccgtgatccgtcacagttacggttacggcgccaggacaacgactcctacgtcctcgtcccgccggccgctttggaatgttaaatgcggtgagaacgattcgatcagtgtatgttgttgttgctggacagagtggaaagcgagcgttaacagtggaagaacaagaagcgacagtatcgtctaacgttaatttaggtaagttgcgcgcattcctcctttcggatccgtcgttcttattttgtacttgctgaatcgcccgaggttaaatggttggttaaacacttgtccccagagttaacgctagccattgaattttgttgtaagcgcggtcgccagtgttgggaagcgtctgttaggtcagctgataaagttacatgcgtgcaggtaaaacatcaatttaatcgacagctcccgtattccaggaagatttgctcctttcaaattaaatgcactggcatcctgtgctagtatatcttgcattccaggcgagttcagcgcacgttgaagtttcgataagataaagccggtctttaccataggaagggttatttacatattatggtactagcaagcagcatcaaaacctaactggagctttcgtagtgaagtaaacgaaattcgactaactcggtagtggtttggccagtagtggagataaggtataaagctttgtattttacaatgttaactgtttttactgtacaccttttgcactgcactgaccactgcctgcataattgatcgagggacaagttgaggcttatatccttttgcattgccccgctctccacccactcccttgcaccctggtggcagtcattctggttttctcacccacaccatcgccattgtcttggtctccatcttatccacacggtctgtgcatgagtgtgcccacgacaaagaggaacggcaataattgccacagcctttctgcccatgcttctcgttctccacctccttgctctgcctctcaatttgctctccttttctccttctgctctgtttgctgtccgaattcgttcgccaatcgacagctgatgcgtcggccatttaacggattcacttggcgcgggctattttgtttatagatatactatagatggtggcccttttttgggatcccattttgccgttaagataaccttttcatatatatggctccaggctgctaacccacaaggttgttggtttgtttgctcaatacgcatatacacgcatttagtgtgcgacaattatctgcggggagccaatttgttatcaatatagtccccctccactgaatcacacagtttttattgtaaacccttgtttatgggcgaagagtttccctgattcagacatttgacagcagttctctgattgctgcgcagatggcttcgagaatttatgttgcgaatcatccagcatattcccaattgctcgtattaaccgtaatgttatataacgcgtaataatctccaaaataaatatatattagtttgtttttgccaaaaggaaatccctatactattacatttaagtgattactgcttaagtgatacttcgatgtcgacgcggatacgatatgggtttttctttatgggtagataagcaaagcaaggccacagcctaataaccgacaaccccttccattgcagattatggcgaatttaaattttcaacaacccccgagaagtatagcgaacgcggcgttacgtggccggacaacaggcggattcggtggtagctccctggctggccatgtgacgcccacgtcgggcatgtttcaaaccggtaagcacttgtcgcccaaagcttttgacggagcaccaattcacatttgttgccttagacttcgccaactcctatccaggaacggcgaactacggacaggcgccgcagcagcagcaacaacagcagcagcagccccaactgtcgccgaaccggaatgcccagctgtcggtcggcggacccgccatctcgagcggcaaccgcaacgccaacctcttcggccagcgtcagtttgtggagcggcgagccatgcaaggattgggcagtggccccatggtaagcagcgcggcattacaacaaagtctaactcctccaactcggtcttgtccaagatactcaaagtaaaacatataacaatatctatatccattgactgtgggtttagtacttcaatacttcggattgcatcagagaatcgtatcgctgatcgatcagatttatataaaggaaatatttttgatacaacggaatatacattaatttcagaagttacaaatgctttcacattacataaaaaatataccctctattaagattgagttggagatgtcagtcctaattctaaaaataaattgttaagacttggctaatcattatctctttccgcagtcgaacatgggcaacttcatgcagacgggtcgcggcggctacggaacgggcggaggcggtggcggtcctttgaataacttccacgtgttcggcggcggcggtggtagcgacacctccacgcctgccctgctcgatcccacggagttcccctcgctgacgaatgcgcgcggccagaacgaccagacactgccccaatcgaatccgctccagccgccgggcagcaaaccctatggtaatttctttacctcttgtgagttcaaatcaaaatccacttctttttatttatttttgtttttaaaactacgattaagaatcggttgtaagcgtggtgtctcgtgatcagctcattaagcccacttagatatgctacgctgtatttgggactaacctcgggtgttggtttgggtatggcaaacgctgcaaaaactagattcagtcaaggacatttactttggctacgttggtccaaccgaatacgggcttctgattccatgaagagcttttgcaatttagagtttgaaatgaaattgtgtttccggattatactccaaacatattattatatgcaatctcatttactttgaaacatgatcaatgaataaaaagaaactgttcacataaagcaagcgacttaaccttttataagttcatatataggtgaaggataactttaaattcacagtaacatgtcttaaaaccttgaacaaatgctgtttggacctactcattgattttaattggttgaggaaaaagaaattaactaaaatcgtgtgtattgtatgagcttaaactgctttagtactaatttcttcgcttcactcattgccctgggcgaccatctcgctcctcttctgatttcagttggcatggtgaagcaaccgacgtcagagcaatcggagttcacgatgtctaacgaggacttccctgcgttaccgggcacccaaaactcggacggcacaacgaacgcggtggggagcgtcgccggaacaggaggctccggaggtgcgtccacagagaaccacttggacggcacggaaaagccgatgaattcgatagtggtcagcggatcagcgagcggcagcagcggttccaacgtcggcgttgtaggcggcaatggtctcggtgccgttggcagtggtatagggggcttggcagtaggcggcggcggaggagctggtagctcaggaggcggaggagtcggcggcaatgcagccagcggcgttgtcggcgggtcccatgtaggactggtgggcagtaacagcggcattggcggcgtcaacagcgtacccaacagcaatgccatgatgggcgtaggcggcggcctggggagtggaagcggctcgtctgggagcggagcgggcggcgagcatctgaacgataattccagcaacgataaacttgtaaagagcggcgtgcaaacttcgccagatggtgagtgctggaacacttctcacaacatgtgagagagcgtatttttgaccttttgatcatttggagctttgaattgaacactctatggatgattgataccatttaatcaatggatttcttggtttctattattatttgtttcatattataattcggtgatttcggtgtacatcacaaaagcccaacagctatactatccttgacccattttatccagaaataatagtaccatgaaatattttatttatttaaaaatgtaacaaatttacctttcgttcgttttgcataaatagggaaggtcacaaacataccagcgaccatggtgaacaaccagttcggcatggttggcctgctgacgttcattcgggctgcagaaacggatcccaatctggtgacgctctccttgggtacggatctcacgggtttaggcctgaacctgaactcgcaggagagcttgcatacaaccttcgctggccccttcgtagcacagccctgcaggtcagttacaataacttacataatttaattgcttattgagtactattgagtaagaggtgtaccaaattagtaacattggatttgcatttacttttttcagagcacaagacgttgagttcaacgtgccacccgaatatctgattaactttgcgataagagacaaactaacagcgccggtactgaaaaagctgcaagaagacctgctctttttccttttttacacgaacatcggcgatatgatgcaattgatggcagctgctgaattgtgagtacttcctcttgcgtagctattatctaagcttcgtatgaacatatatagaacatacatatatactaaaattctgctcccatcgcaggcatagtcgcgagtggcgataccacgtggaggagaaaatatggataactcgaattcctggcattgatcaatatgaaaaaaatggtacaaaagagcgcggcaccttctactactttgatgcgcaaagttggaaacgtttgtccaaggttttccaaatagatcccgagaaattagataaatgtcccaatataagtgcgtttatgaatggacagtctgtataaaattaataaaaatgaaaaaaattgaaaaagaaagtatgctgttgtttttgcattgcaacaaggacactcaacactaactgaataataagttttattataaaaattaaaaacaatccatttgagtttttcttctaaaacggtgttaggatatatatacatacatatatgc

SEQ ID NO: 215 - protein, 579 aa, Drosophila melanogaster
MANLNFQQPPRSIANAALRGRTTGGFGGSSLAGHVTPTSGMFQTDFANSYPGTANYGQAPQQQQQQQQQPQLSPNRNAQLSVGGPAISSGNRNANLFGQRQFVERRAMQGLGSGPMSNMGNFMQTGRGGYGTGGGGGGPLNNFHVFGGGGGSDTSTPALLDPTEFPSLTNARGQNDQTLPQSNPLQPPGSKPYVGMVKQPTSEQSEFTMSNEDFPALPGTQNSDGTTNAVGSVAGTGGSGGASTENHLDGTEKPMNSIVVSGSASGSSGSNVGVVGGNGLGAVGSGIGGLAVGGGGGAGSSGGGGVGGNAASGVVGGSHVGLVGSNSGIGGVNSVPNSNAMMGVGGGLGSGSGSSGSGAGGEHLNDNSSNDKLVKSGVQTSPDGKVTNIPATMVNNQFGMVGLLTFIRAAETDPNLVTLSLGTDLTGLGLNLNSQESLHTTFAGPFVAQPCRAQDVEFNVPPEYLINFAIRDKLTAPVLKKLQEDLLFFLFYTNIGDMMQLMAAAELHSREWRYHVEEKIWITRIPGIDQYEKNGTKERGTFYYFDAQSWKRLSKVFQIDPEKLDKCPNISAFMNGQSV

SEQ ID NO: 216 - DNA, 3624 bp, Drosophila melanogaster
gagtagatcaccagccttactccgacgtttattacgaattttctcggtgactcggtgacaactacaaaactgcgtgcggtgctgtatagattttcgcttgagaggaacacacaaatcataatactagatacgcgaaccgatcgcacattaatttatagaaccaaaatcgaaaatctgacctagcaaacatgtcgtcatcgcaggctgtccgctcctcgaaatactcctaccgtgccacgtccaccggacccggtaccgccgatgtgaacatcgagtacatccaggacctgagctcgctctcccgcttggaggacaagatccgtttgctccaagatgatcttgaagttgaacgtgagttgcgtcaaaggatcgagcgcgagaaagccgatctcagcgttcaggtcattcagatgtccgagcgtctcgaggaggccgagggtggtgctgaacatcaatttgaagccaaccgcaagcgcgacgctgagctgctgaagctgcgcaagctgcttgaggatgttcatcttgagtcggaggagaccactttgcttttgaagaaaaagcacaacgaaattatcacggatttccaggaacaggttgaaatcctaacgaaaaacaaggccagagccgaaaaggacaaggccaaattccagaccgaagtctacgagctgctctcccagatcgagtcctacaacaaggagaagatcgtgtcggagaagcacatctccaaactggaggtctcgatctccgagctcaacgtgaagatcgaggagcttaaccgcaccgttatcgacattagctcccaccgatcccgcctctcgcaggagaacattgagctgaccaaggacgtccaagatctgaaggttcagctggacacggtctcgttctccaagagccaggtcatttcccagctggaggacgcccgccgtcgcttggaggacgaggaccgtcgtcgctcgctgctcgaatcctctctgcatcaggttgagatcgaattggactcggttcgtaatcaactcgaggaggagtccgaggcccgcatcgacttggaacgtcagttggtcaaggccaatgccgatgccacctcctggcagaacaagtggaactccgaggtggctgcccgcgccgaggaggtcgaggagatccgtcgcaagtaccaggtccgcatcaccgagctggaggagcacatcgagtccctcatcgtcaaggtcaacaatctggagaagatgaagacgcgcctggccagcgaagtggaggtgctcatcatcgatctggagaagtcgaacaacagctgccgcgagctgaccaagtcggtcaacaccctcgagaagcacaacgttgagctgaagagccgtctggacgagaccatcatcctgtacgagaccagccagcgcgacctgaagaacaagcacgccgacctcgtccgcactgtccacgaactggacaaggtcaaggacaacaacaaccagctgacccgcgagaacaagaaactgggagatgatcttcatgaggccaagggtgccatcaacgaactgaaccgtcgtctgcacgaattggaactggagctgcgtcgcctggagaacgagcgtgatgagctgaccgctgcctacaaggaagccgaggctggccgcaaggctgaggagcagcgcggacagcgcctggccgccgacttcaaccagtaccgccacgacgccgagcgtcgtctggccgagaaggatgaggagatcgaggccattcgcaagcagacctcgatcgagatcgagcagctcaatgcccgcgtcatcgaggcggagacccggctgaagaccgaggtgacccgcatcaagaagaagctgcagatccagatcaccgagctggagatgtcgctggatgtggccaacaagaccaacatcgatctgcagaaggtgatcaagaagcagtcgctgcagctgaccgaactgcaggcccactacgaggatgtccagcgccagttgcaggccaccttggaccagtatgccgttgcccagcgccgtctggccggtctcaatggcgagctggaggaggtgcgctcgcacctggacagcgccaaccgtgccaagcgcaccgtggagctgcagtacgaggaggctgcctcccgcatcaacgaactgaccaccgccaatgtcagcctcgtctccatcaagtccaagctggagcaggagctctccgtggtcgcctccgactacgaggaggtgtccaaggagctgcgcatcagcgacgagcgctaccagaaggtccaggtggagctcaagcatgtcgtcgagcaggtgcatgaggagcaggagcgcatcgttaagctggagaccatcaagaagtccttggaagtcgaagtcaagaacttgtccatccgcttggaggaggtcgagctgaacgccgtcgccggcagcaagcgcatcatcagcaagctggaagcccgcatccgcgatctggagctggagctggaggaggagaagcgccgccacgccgagaccatcaagattctgcgcaagaaggagcgcaccgtcaaggaggtgctggtgcagtgcgaggaggaccagaagaacctcatcctgctgcaggacgcgctggacaagtccactgccaagatcaacatctaccgccgccagctgtccgagcaggagggtgtctcccagcagaccaccacccgtgtgcgccgcttccagcgcgagctggaggctgccgaggatcgcgccgacaccgccgagtccagcctgaacatcatccgcgccaagcaccgcacattcgtcaccacctcgacggtgcccggatcccaggtgtacatccaggagaccacaaggacgatcaccgaatagagccccacgctccgcaccgagatcatttcattatcaaacgctaaccgaagaatcgaacacaaccaatcccgaacccatgaagaagaccatctggcggagggcagagttcagagtgcaggacgagaacgagaattgcgtgagaaagtttttataatttaaatttttttgtcaaacccccaaaacgccgcggcagcgatcaagaacccagtggacttcggcgggggctcgtataggctacacactataaatacataacactacacatcctatctatataataataatactattttgaagttcatgtaatttaattaaaataatgaacctgaaaaacctaaaaacaaaataaaaacaaaccaacgaaaacttggcagagttttgctagcgctagagatatgatatataccatataccatataccacatacgatatataatacttgtacgtagagagatgagagagatcaaccgagttggctgaacaataacgtttaatggaaatggagcccatttgaacgaaaagcactaaaacttaataacttgaaatggaaatgataatcgtcaccgaaatatcccactaagcacgccaccgcagcatcgagttaaccgagttacaaccgcttctactatttgtttttagttcactttatgtttagtaggtaaatttctgtgtgctcgtaacgaatttgaattttacattaaatcagcatcaacaaaactgagcaattttcacattttttacttgtatcttgcaataaaaacgaaattctattcataataataacaataagaaattg

SEQ ID NO: 217 - protein, 879 aa, Drosophila melanogaster
MSSSQAVRSSKYSYRATSTGPGTADVNIEYIQDLSSLSRLEDKIRLLQDDLEVERELRQRIEREKADLSVQVIQMSERLEEAEGGAEHQFEANRKRDAELLKLRKLLEDVHLESEETTLLLKKKHNEIITDFQEQVEILTKNKARAEKDKAKFQTEVYELLSQIESYNKEKIVSEKHISKLEVSISELNVKIEELNRTVIDISSHRSRLSQENIELTKDVQDLKVQLDTVSFSKSQVISQLEDARRRLEDEDRRRSLLESSLHQVEIELDSVRNQLEEESEARIDLERQLVKANADATSWQNKWNSEVAARAEEVEEIRRKYQVRITELEEHIESLIVKVNNLEKMKTRLASEVEVLIIDLEKSNNSCRELTKSVNTLEKHNVELKSRLDETIILYETSQRDLKNKHADLVRTVHELDKVKDNNNQLTRENKKLGDDLHEAKGAINELNRRLHELELELRRLENERDELTAAYKEAEAGRKAEEQRGQRLAADFNQYRHDAERRLAEKDEEIEAIRKQTSIEIEQLNARVIEAETRLKTEVTRIKKKLQIQITELEMSLDVANKTNIDLQKVIKKQSLQLTELQAHYEDVQRQLQATLDQYAVAQRRLAGLNGELEEVRSHLDSANRAKRTVELQYEEAASRINELTTANVSLVSIKSKLEQELSVVASDYEEVSKELRISDERYQKVQVELKHVVEQVHEEQERIVKLETIKKSLEVEVKNLSIRLEEVELNAVAGSKRIISKLEARIRDLELELEEEKRRHAETIKILRKKERTVKEVLVQCEEDQKNLILLQDALDKSTAKINIYRRQLSEQEGVSQQTTTRVRRFQRELEAAEDRADTAESSLNIIRAKHRTFVTTSTVPGSQVYIQETTRTITE

SEQ ID NO: 218 - DNA, 1521 bp, Drosophila melanogaster; identical to SEQ ID NO: 198

SEQ ID NO: 219 - protein, 440 aa, Drosophila melanogaster; identical to SEQ ID NO: 199

SEQ ID NO: 220 - DNA, 116 bp, Drosophila melanogaster
atgcggatgcggattcacattcagattcgcattcggatgtggatgtggatttcgggcgaggtttcgggtgtggatgtggatgtggatgtggatgtggatgtggctgtggatgcgga

SEQ ID NO: 221 - protein, 38 aa, Drosophila melanogaster
MRMRIHIQIRIRMWMWISGEVSGVDVDVDVDVDVAVDA

SEQ ID NO: 222 - DNA, 81 bp, Drosophila melanogaster
aaacatcttcatcaaatgggcctcattctgctgccgctgacagctgatgagggcgctgcccgaccctttgtaccgccctag

SEQ ID NO: 223 - protein, 26 aa, Drosophila melanogaster
KHLHQMGLILLPLTADEGAARPFVPP

SEQ ID NO: 224 - DNA, 807 bp, Drosophila melanogaster
taccggtgaaaccttctgtttgataacccgctctttgaactcatgatgacgtcgtcgtcgctcccgctcctgttaccactgctccctccgctattattcccccgtaggccctttagggctacgaggccagactggtagctgtgtttaggcctacgctgaggccgaccacctaaggccgtcgtttcgagttgcttgtgcccagggttcccgcaacatttcctgaccgtctctaagttcgtcgagctccgcctcgctgccctactttggcttgcagttgcagaccgcgaccggttcttcgagtggtaatgccgctgttgcagccgcctcctgctccttgcgttcgccgtcctccttgacctgcggctcgacctgcttgactactcgctcctgaaggacgtcgtcatggtctttgtcgcctaccggctctacgacgcggtctgccccgtggtggtcgtcaaaccggtccacgtcgtcaactggtcggtgctcctcaaggagcggacgcagctcgtcctcttgttcgtgtggtggtagtagtaggtgtatatgcttgctgttaaccggcggacacggtgcgacttgtttacggaactgtcagaccggtcgctaataggcaggtaattcaagcggttctagacgtcaaggcaccggccttactcgtccctgaaggcgtggtttcctaacgggcgggatgaccatatgttccgggttcgccagtagcctttgaaacacgccgaatggctactggagtcgctactgaagaagcggaggctgcagctctcaaaagactaactcgtgccgtaatat

SEQ ID NO: 225 - protein, 269 aa, Drosophila melanogaster
MATLEDKLLGEKLEYYCSSSEGEDNGDEGGDNKGASGKSRCSGLTIDTNPDATPAGGFRQQSSTNTGPKGVVKDWQRFKQLEAERRDETERQRLALAKKLTITATTSAEDEERKRQEELDAELDELMSEDFLQQYQKQRMAEMLRQTGHHQQFGQVQQLTSHEEFLACVEQENKHTTIIIHIYERQLAACATLNKCLDSLASDYPSIKFAKICSSVAGMSRDFRTKGLPALLVYKAQAVIGNFVRLTDDLSDDFFASDVESFLIEHGII

SEQ ID NO: 226 - DNA, 1398 bp, Drosophila melanogaster
atgtacgcctataataagatgggtcgggttccagagcttgttatatgctccttcatagtggtcagcctgctggtcatacacttcttctctgatctgctgagagcctccctaggcggctactacaaccaggatgttacactttcccagctggttgagtcgcagaactcggactacgcatggttcctcaagctgctggtcaattgctttggttatagctgcgtctttgtgccgggtttcttgatctacaaatatgtcggcaggattaactacctggaaagaggcaacaagacattcctgcacaaggctatcaatatgtgtatcacgggtaactctggatacgatcagttggatgcagggagcagcaccgcggataaggatcgtccggcagcctcaacggcaccaaagcgaacgagttcccaggaggccgtgcagctattatggtgctttggcggcctgatgatctcctatcttacctggggtgtactgcaggagaagataatgacgcaaaactatatgaacttcactggagaaagtgccaagtttaaggactctcagttcttggtgttttccaatcgtctgctggcctttctcgtggcgctgggctatctacaatggcagccctcacctgtgcgacaccgtgcacctctgtacaaatactcctatgcctccttttcgaatataatgagcgcatggttccagtacgaggccctgaagtttgtcaactttcccacccaggtgctggccaaatcgtgtaagattatacccgtgatgctgatgggcaaaatcatgtctaaggcaaagtacgaaagttacgagtatgtgacggccctgctcatatcgctgggcatgatcttcttcatgagcggctcctcggacagcagcaaggccagcggagtgaccacgctcacgggcattttcctgctctccatgtacatggtcttcgacagtttcactgccaattggcagggatcgctcttcaagagctacggcatgactccgttgcagatgatgtgcggcgtcaacctgttttcctccatcttcactggagcctcgctgtccatgcagggaggattcatggactccttggcatttgctacagagcatcctaagtttgtgtttgatatggttgtgctttccgtttgttcagcggtcggccaattgtttatctatcatacaattgatgtcttcggcccagttgtgtttacgataataatgacactgcgtcaggcggtggccattatgctctcctgcttcatctaccagcacagcatatcgctgttgggcatcttcggtgttctgatcgttttcgttgccatcttcctgagggtctactgcacccagcggttgagggccattcggaagcgggccgaggccaacaaaccgaaaatggctgtctaa

SEQ ID NO: 227 - protein, 465 aa, Drosophila melanogaster
MYAYNKMGRVPELVICSFIVVSLLVIHFFSDLLRASLGGYYNQDVTLSQLVESQNSDYAWFLKLLVNCFGYSCVFVPGFLIYKYVGRINYLERGNKTFLHKAINMCITGNSGYDQLDAGSSTADKDRPAASTAPKRTSSQEAVQLLWCFGGLMISYLTWGVLQEKIMTQNYMNFTGESAKFKDSQFLVFSNRLLAFLVALGYLQWQPSPVRHRAPLYKYSYASFSNIMSAWFQYEALKFVNFPTQVLAKSCKIIPVMLMGKIMSKAKYESYEYVTALLISLGMIFFMSGSSDSSKASGVTTLTGIFLLSMYMVFDSFTANWQGSLFKSYGMTPLQMMCGVNLFSSIFTGASLSMQGGFMDSLAFATEHPKFVFDMVVLSVCSAVGQLFIYHTIDVFGPVVFTIIMTLRQAVAIMLSCFIYQHSISLLGIFGVLIVFVAIFLRVYCTQRLRAIRKRAEANKPKMAV

SEQ ID NO: 228 - DNA, 346 bp, Drosophila melanogaster
atggagctggagattttgaacgcgaagaacagcaagccgtacggcaaggtgaaggtgccctccggcgccacgcccatcggcgatctgcgcgccctaattcacaagaccctgaagcagaccccacacgcgaatcgccagtcgcttcgtctggaactgaagggcaaaagcctaaaggatacggacacattggaatccctgtcgctgcgttccggcgacaagatctatgtgaaggatctgggtccccagattggctggaagaccgttttcctggccgagtacgccggcccactgattgtatacttgattttctacttccgaccggagttggtgtacggcaaagctgcca

SEQ ID NO: 229 - protein, 115 aa, Drosophila melanogaster
MELEILNAKNSKPYGKVKVPSGATPIGDLRALIHKTLKQTPHANRQSLRLELKGKSLKDTDTLESLSLRSGDKIYVKDLGPQIGWKTVFLAEYAGPLIVYLIFYFRPELVYGKAA

SEQ ID NO: 230 - DNA, 517 bp, Drosophila melanogaster
ttaaccccttgacgtcaacaccgtcggcgtgttgtacgccgatttacaactgtgggtcgtctgcggtgtcagtggcgtttttgcgttcggagccctggagaccaggagagtctgctccttctttggattactcaccctactagctaaccccacctgggacaataccttctaaggtaaatgattattgtcacaaaaatgtaatttactttcaaagcttttatattatatggtcaagtagtaattctttgtatcggaggacggtataaaattcgaatcaaaatcacattcgaatcaaattagcttaatattactattatttatttaatcaaggtttacttttaggtagcaatataaattaatttacattgaagcaatcgtgaggtagggttagcgcacgtccggtccaggtctacccgtgttataccacgacgaggaagaggaagacctactgcggcgaccgaagtaccggtgtcaacgtcaacgtcgtgaaaaataataaagagggtcgagaccgact

SEQ ID NO: 231 - protein, 88 aa, Drosophila melanogaster
IGELQLWQPHNMRLNVDTQQTPQSPQKRKPRDLWSSQTRKKPNEWDDRLGPGPDGHNMVLLLLLLDDAAGFMATVAVAALFIISPSSG

SEQ ID NO: 232 - DNA, 711 bp, Drosophila melanogaster
tacccagactactacccgtagcggacacaccactaaggggctaacaccaagaaagacctcttccaaatatcccaaaagcacctcatgtgagggtagtaaatgaattcactcctagcggacagcgggcaaaggttttcggctgactcagagcaccggtccttctgtgaacaggacctgtacctattgtggtactagtgcagcaccaaatatttctcccctttttttggcttcttatatggtgcttaacgcgtactgaaattcaagatgaacggccggatacctcggtggtagatacagatgttcgcggggataaacctagtgaaggagctagcgcataggttcaccatgctggactgacagaagtgtaggcctcggctctatatacggagaggctaagagctgaaagacctgtcccctgcaccgtaggatttgtcagcggagatggccgtcgtaacgtatcttgtcaaacctttcaccaggttcaggcatgacgaccggacgggcctaaacaggttacaacacgacgacctgttgaggtcgtgcctcacgtcaaagttacgccttttgcggtaagagtagttcaggatactttagccgacagcgctgctccgggagtagttaaacaatggaaaagacctgcgggacgctaagtacttcctacacgctagctacgagtttgcaacgtgagcgaagctttcaaaacgagtcact

SEQ ID NO: 233 - protein, 236 aa, Drosophila melanogaster
MGLMMGIACVVIPRLWFFLEKVYRVFVEYTPIIYLSEDRLSPVSKSRLSLVARKTLVLDMDNTMITSWFIKRGKKPKNIPRIAHDFKFYLPAYGATIYVYKRPYLDHFLDRVSKWYDLTVFTSGAEIYASPILDFLDRGRGILNSRLYRQHCIEQFGKWSKSVLLACPDLSNVVLLDNSSTECSFNAENAILIKSYEIGCRDEALINLLPFLDALRFMKDVRSMLKRCTRFESFAQ

SEQ ID NO: 234 - DNA, 4405 bp, Drosophila melanogaster
tacctattgtcatcgccagttttgtcgtcttgccgaagcagtcgcaggtgttcgttttatcagttgataagcagtggtcagagcggtcctcagcgtcggcggtggaggagtaggagtagtaggtcgtcgtcgccgtactcatcgtcggtcctcctgtggcatgaccctaataaatgcgggtttttcctcaaggggttacggttctacgacgtctggtagtccctcttcgattactgcgggccgcctcggacactggaagaccgggacccgtagcgtcgccttgggtgtctggtcgtcgggcagttcgagtaggttgtcgcaatagactagtcgcgtgtcggatcagtgtatagccggcggcaccgacggttctgagggcggagcatagcggtgaaccagctagattggcggaggttagacgcgacgcacctgtagaagtggcccctcgtcaaggagacggcataacatttgcttggcaacgtattccacgttgctcggatgaaagtcgacgtcgtcgtgctgctcctcgatgcggcctcgtggtagataccggtaggtgactaggctgggcacgtgctatagtatggcgaatggttcctagcgtggatgtaggagtaacgcgggcacggggtcctctccctgaggtgcccaccccactggccccacatgctcttggacgtgtggatgtaggcggtgcgcttcgctgacacgctctgcctccgctcccggtataaggtggtctagacagtctgacaagtccacacggtggcgttgccctaataggagtccctggagttcgagttcgccaagatgaagtagctgctccggtccactcaacgcacaggtccactgtggaagctttttgggtatatgtggttatatgcggtgtatacggactgaatatggttgagttaacgtataccgaccgatcagccaaataaaacgttaagctacctttgagcaatactcgctctctagaacaaacaccagcacacaaccaccacggtgttaacaacgagaacaataaccgggtacaacaacatcaacgacgacgacgacgacaacaacgaaaacaaaaacaacgaccgcggcagcaacacccattgtaacttgtaaattgttcacaacgttagcttagtggttatccggttgttgttgttaatatgactgtttggcttacttgcgttccgcatgcatacatgtcgtgtcccatattaccatcaaagtttgattaaaatattcatttttatataaggatgatacgcttcgtaacgtttttacttacccttattctagtttttacaatttattaaagtttctattcaaaaactttatgtggataataatttgataattaattgtaccacataatcgaaacatcgatttcttaataataaatacattatagtaacttaacggtaagtcactcgttcgtatacggaataaaacgtctggggctgacatagagacacatgtatgagcatgtgttcccgggttacacggtgtgactaccggttttacaaccgagtgagcaaaaaagtaatgtgtaaagccttcgatctttaacggtgtaaagttcttaacaagttgtatcgtaaacgttataccaaaaccccacccctagacacccggtgcatgagccgcaagcgaactaaacagctaaagggcacacactcaaatgtcacctactactttataactggggtggaagtagcttttacataaaagcgtatacaattaattgtgttgacatagcttttgcgcgacagagggcaagaataatagaagctttaacatgactgtagtcgtaccttgctgaacttgtaaaccagctaaagcatactgagacgttaatcgcgttatagacgactaaaaaagcagtaaagcagcaagacacggttcacgttttgccgccttccttctttggttgggtatctagagatagatatgatatgaagagagtggaaccgctctttatttgttgttcacaagttatgctgagtttacgcgacgctaatgaccgcgagtgaaggtaagggtaaaggtaagcttattatgtagcgatatatctattcacgagcgacccacatgtatgtatgatatacccgatacccgcaccggtataggtatagatgtatacaggttgccccgccggtgtgtgtgcgtgttggtttattgctcggcttaaaaattccagtgtcacgccacttacagggactgagactagaagacataaacttgcgtaaatacatgtacgtatatacggtcacggagggtatatgtttacgcatacgaatacgtacatttttagagaccaagtatgaaaataaaacagatgagaaaacggcatgcatttatgaaggttccacaaactcgtaaatacgccgcggccaaaaggcataaagcaaagctaaggctaaaataaaattggagacagcgcccaattacacacggtttgcatatctcgctctctctctctctctccctttcttctctaggtgttctgcgagaagtttcgagccaatacagcgcgtagctccagtcgtcgacattgataagaggagtagtgtagaggtggacggaaggcacgtgagtttttatatttataaccaagtgtattttggaactagaattttcatattaatatatacgaacggaactagaatttatattcaaatattacaaagacatagcttaccccattgatctgctatctcctgtgtttttagtttactttgggcttttgtttacatatctttgtacgagaattaattcttggcacaagaaacttatataataaatttacgcgatagagaaaagggagaataactaacgggtggacaacgatagttcaacttccattaaacaaagaaagtcacatgtgacactaaacacggctcctctccgcgcaaaagtttcgaacaaaaacaagtcccagtcgagctccaaaaaaaccggacgaaacacaaaccgagaaacctacaaacctatggtctggcgccgctggcacacaaacatatagcgaggcaagcgatagccgccttatgggttacaaccatcaccacgagcccagggtcgtcttcgcggcaacgtcgttgttcaacgctatgcagtgaggtggagtggaatgatgagtgcgtcgagtgtgtcgcctgagagaaacctagatacgcgacacgagcgaccgcaaaagcaatgaaaaaacgaaaaacgtaagcttacacccggttacagttacctcacctcaccgggttacctccccctcacctcacctcacgtccccgcctccgccgccgccgccgccgtgagcgagtacccacagcccccagcgttcgacgcgaaagcagtggttaggttcagttgagtcgagtcgagtgttacacgagagagccggttaaacggaaaactgaacagttatgcggttgcggtttctgttgatgttgactttgacttcgaggcaccggctagctaagttcagagaagctataacgcgatcgattaccggggtgttttagcccccaatacgttcagggtccctaacgtgtactacatctcgagctgctacccagactacttgcccatgtcaacgctagtcttatcaccgtcacggttgagttcaacgtcagtatagatgagaagaaaccgttgttatcaagagttgtataattatctttgcccattttttttctgacaatcaaaataaagattcttcgtatttgtatataaaacatgggataaaaccgcctaataaataagctaaaacagtaaacgattaatgtcttgctttgacgtcatacttagtgaccttccgagttactaggagctgccgctcctgctatgagactcgctgttctagccaacgggtgacatgtggcgaggtcttgacgacacgggggtcgtttgcatgttcccgtttggccgcctgtacaccagcgacccgcactaggacatgtggtacaaccacccagtcatgggcaagatgctcttccggttgacgttggagtagtggcagtatgcggtgcccttacaggtctatggggactgcgacagattcagccacgctaccgacaacgaaagcgacgacgccttcctaatgtgccttgcttactggcggtcggtgtagaaggaatggggcaccgacgctctcgtcgcggggaaggtgtacatggacggtcagctgcacctccaccggctcctgacctcgctacgcctcctcctgcttccgtgacggcggctacgctacctactactgctccttcctgagacagggaacccactgttcgtgctcatgctcctgtaaccgcacctcggtaacctgatgtgcgcgaggtgcgaggtttaccgagtcttacggttacccgacaggtgccttgggcttgggctatgcctacacctgtacccgact

SEQ ID NO: 235 - protein, 795 aa, Drosophila melanogaster
MDRYAVSSLVGQGSFGCVYKAQRRDDDKVVAIKVISKRGRSNRELKNLRRECDIQARLKHPHVIEMVESFESKFDLFVVTEFALMDLHRYLSFNGAMPEEHAQRVVCHLVSALYYLHSNRILHRDLKPQNVLLDKNMHAKLCDFGLARNMTMGTHVLTSIKGTPLYMAPELLAEQPYDHQADMWSLGCIAYESMAGQPPFCATSILHLVKLIKHEDVKWPSTLSSECRSFLQGLLEKDPSMRISWTQLLCHPFVEGKLYIAEVQAAQTSPFINPQLAKDTKKSQQLRHVGADLGDVLAALKLSDVANENLSTSRDSINAIAPSDIEQLETDVEDNVHRLIVPFADISYRELPCGTAAAARRAGAMPLINSQTCFVSGNSNMILNHLNDNFAIEAPASSATKSMKSKLKLALNIKQSRSKDLEKRKLSQNLDNFSLRLGQSIDIEVQRKTTEMLTQQSQAQQLQDRKTQQLKQSMHSTNDEKLSSDNSPPCLLPGWDSCDESQSPPIENDEWLAFLHRSIQELLDGEFDSLKQHNLVSIIVAPLRNSKAIPKVLQSVAQLLSLPFVLAEQHLVAEAIKGVYIDVKLVPNLMYACKLLLSQRHLTDSAASLPAGTGVSLSRTVRSCSDLSAEEMSTACSLYELVCHLVHQQQQFLTQFCDAVAILAVNDMFINFLTHDFKDSRPVRLASCMLALFCCVLRELPENAELVEKIVFDSRLQLAVLLQSRHHLLRQRACQMLLLLARFSLRGVQCIWSGELKSALQAWPMQQTCQSLRLEAAQTLDELSQFSFFVAQATA

SEQ ID NO: 236 - DNA, 12404 bp, Drosophila melanogaster
tttcgtcgcagccacattggagaatcgcagcgagcggagaaaattcgattctcagtcgccttctcctcgtgtcgccgtcggaatttggatttcggttcgcaacaatctggctatattacaaaataaatatattaaagaatatacgaaacgaagtgcaagaaaattcctagtgcagtgcagacaaattgaagttcatcaaatcgataatcaattcatatagcccctgaaaacctccgccaaaagccaaattcttcgccgcgttttattttgttttcgtcaccgatttttgtcgccgtcgccgctgctttttcgccgcgtgtgagaaaagttcggtggaaaatatttatatagatatattcaaatcgggcagaatttccactagagcaacaagagtgatttttaattattattcagccgagaaaatccaacagcaaatacataagcacaacacagcagtagcacaacaaatacacagagtaaaaggcgaaaagaaatattgttcaacaagtcaaacgagttctttttggctcgcttcggccgtgtggctaaagatacaacaacattgtgtttgtggcagcgggttttcgccgtgttgtttttgttgcgcctttggtgaaaaatattggcaaccgccgcagcatttcagcggctcaagcccaaaaggagcagcacagcaaagaagaggccacgaagtaattaccatggcccagctggaaggaggcaacatcagtgaaggacgctcgtagctcctcatagctttcttttcaacatccactcggagtggatccattaaccatgaaagccacgttggattcggtagtcgccagcgaaaagatgacgagggtaacattcactgggatccacgagtcgaaggactttgcaatattccatcgatgccggagacgatccaacatcaaatcgctatattcgccacctgccctgcatccctcgcacatgctgcgaagtagcttactaattctactggcaatcgttctcctgggatcttcgcaggctgcctcacacgatcaggagagggagcgaaagctggaagtcttcgaaggcgttgccgtagactatcaaatcggttatataggagacttcggcggaatcgatagtggtccgccatacattattgtggcggaggcaggagtagaaacagatctcgccatagatcgggccactggagagatccgcacaaaggtcaaactggacagagaaactcgagcttcttatagtctagtggctattcccctgagtggtcgtaatattcgagtgctggtcacagttaaagatgagaatgacaatgcccccacgtttccacaaacctcgatgcacatagagtttccagaaaataccccaagggaggtaaagagaactctacttccggcaagggatctggatctggaaccctacaacactcagagatataatatcgtgtcgggaaacgtaaatgacgcctttagattgtcgtcccaccgagaaagggacggtgtcctgtacttggatctgcagatcagtggttttttagatagagagaccacgccaggctacagccttttaattgaagctttagatggaggaacacccccgttgcgtggatttatgactgttaatattaccattcaggatgtaaatgacaatcaaccgatattcaatcagagcaggtacttcgcaacggtgccagagaatgccactgtgggcaccagtgtcctgcaggtgtatgcatcagacacggatgccgatgagaatggtttggtggaatacgccatcaacagaagacagagcgacaaggagcaaatgtttcgcatagatccaagaacaggagcgatttacatcaataaagcactggatttcgagactaaggagctgcatgaacttgtggtggtggccaaggatcatggtgaacagccgctggagacaaccgcctttgtttccatcagagtcacagatgtaaatgacaatcaaccgactataaatgtgatcttcctgagtgacgatgcctctccaaaaatatcggagtcggcccaaccgggcgaattcgtggccagaatttcggtgcatgaccccgattcgaaaacggagtatgccaatgtgaatgtgacgctcaatggaggagatggtcacttcgcgttgaccaccagggataacagtatttatttggttatagttcacctgccgctggacagggagatagtttcaaattatacactgagtgttgtagccaccgataagggaactccgcccctgcacgcctccaaatcgatcttcctaaggattaccgatgtcaatgacaatccaccggagttcgagcaggacctctaccacgccaacgtcatggaggtggccgatccgggtacatcggtacttcaagttctagcccacgatcgagatgagggcctaaactcggctttgacatactcgctggccgaaacgcccgaaacccatgcccagtggtttcagattgacccacaaacgggcctgatcaccacccgatcgcatatcgattgcgaaacggagccggtgccgcagctaacggttgtcgctagggacggaggtgttccgcccctttcctccacagccacggtccttgttaccattcacgatgtaaacgacaacgaaccgatcttcgaccagagcttctacaacgtatccgtcgctgaaaacgaacccgtgggcaggtgcatactcaaggtctctgcaagtgatccagattgcggagtaaatgccatggtgaactacaccatcggcgagggcttcaagcacctcaccgaattcgaggtgcgctccgcttctggcgagatttgcatagctggcgaacttgacttcgagcggaggagtagctatgaatttcccgtactggcaaccgatcgtgggggtctgagcactactgccatgattaaaatgcaattgacggacgtgaacgacaatcgtccggttttctatcccagggaatataaagtatcgctcagggaatccccgaaagcctcctcacaagcttcgagtactccgattgtcgctgtggtggccacagatccggattacggaaactttggccaggtctcatataggattgtggccggtaacgaggcgggcatcttccggattgatcgatccactggtgaaatattcgtggtccgtccggatatgctatccgttcgtacccaacccatgcacatgctaaatatatcggcgaccgatggcggtaatctaaggagcaatgccgacgccgtggtcttcttgagcatcatcgacgccatgcagcgaccgccgatcttcgaaaaggccagatacaattactatgtgaaggaggacattccgaggggcacggttgtgggttctgtgatagctgcgagtggagatgtcgcccatcgaagtccggttaggtattcgatatactcgggcgatcccgatggctatttcagcatagaaaccaactctggaaacatacgtatagctaagcccctggatcatgaagcgaagtcccaggttctactcaacatccaagccaccttgggagaacctccggtttatggacacacacaggttaatatcgaagtggaggatgtcaacgataatgcacctgagttcgaggccagtatggttaggatttccgtaccggaaagtgcagagcttggagctccactatatgctgcacatgcccacgataaagattcgggaagcagtggtcaagttacatatagcctggtcaaggaatcggggaaaggactctttgccatcgacgcgagatctggccacttaattttgtcccaacacctagattacgagagctcccaacgacacaccctaattgtaaccgccacggatggtggagttcccagcctttcgacgaacttaaccatcttggtggatgtacaggatgtcaacgataaccctccagtttttgaaaaggacgagtattctgtgaatgtgtccgaatcgcgatcgatcaatgctcagattattcaagttaatgccagcgatctggacacgggcaacaatgccaggatcacctataggattgtcgatgccggagtggacaacgtcacgaactccattagtagctcagatgtgtcgcaacattttggcatatttccaaactccggctggatatatttgcgtgctcctctggatcgagagaccagggatcgctatcaactgacgattttggccacggacaatggcactcccgctgctcacgcaaaaacacgtgtcatagttcgtgttcttgatgccaacgataatgatcccaagttccagaaatctaaatacgaatttaggatagaggagaacctcaggagaggctccgttgtgggagtggtgaccgccagtgatctggatctgggtgagaatgccgccataagatacagcctgctgccgatcaactccagcttccaggtgcatcccgtcacaggagaaatttccacccgagagcctctggatcgagagctccgggagctgtacgaccttgtagtggaggcccgtgatcaaggaactccagtgagaagtgctcgcgtccctgtacgcatccacgtaagcgatgtcaacgataacgcacccgagatcgcagatccgcaggaggatgtggtgagcgtaagagaggagcaaccacccggaactgaagtggtgcgagttcgagccgtcgatcgggaccacgggcagaatgcctccattacatattcaattgtcaagggacgggactctgatgggcacggactgttcagcatcgatcccaccagcggagtgatccgaacccgagtggttttggatcacgaggaaaggagcatctatcgcctgggtgtggccgcctccgacggcggcaatccgcccagggagacggtacggatgttgcgggttgaagttttggatctgaacgacaaccgcccaacatttaccagttccagcttggtcttcagggtacgcgaggatgccgcccttggccatgtggtcggttccatcagtcccatcgaacgtccggcggatgtcgtcagaaatagcgtggaggagtccttcgaagatctgcgcgtcacctacactctaaatcccttgaccaaggacctgatcgaggctgccttcgacatcgatcggcattcgggaaacctggtcgtggctcgtctcttggacagagaggttcaatccgaatttaggttggaaattagggctttagataccactgctagtaataacccgcagagcagcgccatcacggttaagatcgaggtggccgatgtcaatgataatgcccctgaatggccacaggatcccatcgaccttcaggtgagcgaagccactccagttggcacaataatacacaactttacggccacggatgcggacacgggaaccaatggggacctacagtatcgattgatccgatacttcccccaactcaatgaaagccaagagcaggcaatgagtctttttagcatggattccctgacgggagcactcagtctgcaggctcctttggacttcgaggctgtgcaggagtaccttcttattgtccaggcgctggatcaatcctcgaatgtaacagaaagactgcagacttcggtgaccgtgagattgcgaattctagatgccaacgaccatgccccgcactttgtttcacccaattcaagtggtggcaaaacggcatctcttttcataagtgatgcaactagaatcggagaggtcgtggcgcacattgtggccgttgatgaagattccggggacaatggacaacttacctacgaaatcacggggggcaatggggaaggccgctttagaatcaattcccaaacaggaataattgagctggttaagtccctgccaccggccaccgaggacgtggaaaaaggtggacggtttaatctaatcataagtgcaaaagatcatggtcaaccggagcccaagaaaagctctctaaatctgcaccttatcgttcaaggcagccacaataatccaccccgatttctgcaggctgtttatcgagccacaattttggagaacgttcctagcggaagtttcgtcctgcaagttacggcaaaaccactacatggtgcagaaaatgctaatttgagctatgaaattcctgctggtgtggcaaatgatctgttccacgtggactggcagaggggcatcattaccacacggggacagtttgaccgggagtctcaggcaagttatgtcctgcccgtctacgtacgggatgccaaccgccagtcgacgttgtcctcttcggcggtgagaaagcaacgctcgtcggatagcatcggagatacatcgaatggccagcacttcgatgtggccacaatttatataacggtaggagatgtcaacgacaactccccggaattccgaccagggtcatgttatggtctatcaatcccagagaacagtgaacccggtgtaattcacactgtggtggccagcgatctggatgaaggtccgaatgcggatcttatttacagtattacgggcggcaatctgggcaataagttcagcattgattctagttcaggagagctaagtgcccgacccttggatagagaacagcactctcggtacaccctgcagattcaggcatccgatcgggggcaaccgaagagccgtcaaggacactgcaacatcaccatattcgtcgaggatcagaacgacaatgccccgagattcaagcttagcaaatatactggcagtgtgcaggaggacgcaccactgggcaccagtgtggtgcagatcagtgcggtggatgcggatttgggcgtcaacgccagactcgtttactcgctggccaatgaaacgcaatggcagtttgccatcgacggccagagcggattaatcaccactgtgggaaaactggatcgcgagctgcaggcgagctacaacttcatggtattggccacggacggaggacgttatgaagtgagatcagctacggttccggtgcagatcaacgtgctggatattaatgacaacagacccattttcgagcgatatccctatataggccaggtcccagctctcatccaacctggccagactttgctgaaggttcaagccatagatgcagatttgggtgcgaatgccgagattgtgtattccctcaatgctgaaaattcagcagtaagtgccaagtttagaataaatccaagcactggtgccttgagtgcctctcagagtttggccagtgaatctgggaagcttttacacctggaggtcgttgccagggataagggaaatccgcctcaatccagcctgggcctcatagaacttctaataggggaagcaccgcaaggaactccagttcttaggttccaaaatgaaacctatcgagtaatgctcaaggagaattctccatcgggtacaagacttcttcaagtggtcgcactgcgcagtgatggccgccggcaaaaggtgcaattctcatttggggctggtaatgaagatgggattttgtccttagactcactctcaggtgaaataagggtgaataagccccatttacttgattacgaccgcttctccacaccctcaatgtcagccttaagtcgtggcagagctctgcattatgaggaggaaatcgatgaatcatcagaggaggatgcaaataatagcacccgatcgcaaagggccttgacgtcctcatctttcgccctgaccaacagccaacccaatgaaatacgtgtggtcttagttgcgcgcaccgcagatgctccattcctggccagctatgcggaactagtgattgagcttgaagacgagaacgacaatagcccaaagttttcgcaaaagcaatttgtggcaacggtttcagaaggaaacaacaagggaacctttgtgtcacaagttcatgcattcgattcggatgcgggctcaaacgcccggctgcgatatcacatcgttgatggcaaccacgacaatgcattcgttattgaacccgccttcagtggcatagtgaggaccaacatagtgctggatcgagagattcgcgatatatataagctcaagataattgcaaccgatgagggagtgcctcaaatgactggcacggccacaataagggtgcagatcgtcgatgtgaatgacaaccagcccacttttccgccaaacaatctcgtcactgtcagtgaagctactgaacttggagccgtaataacctctatttcagccaacgatgtggacacttaccccgccctgacctaccgccttggcgcagagtctaccgtggatatagaaaacatgtccatctttgccttggatcgatatagcgggaagctcgttctaaaacgtcggctggactatgagctccagcaggagtatgaactcgacgtgattgcttcggatgcagcccatgaagctcgcactgttctaactgtgcgagtgaacgatgaaaacgacaatgcaccagtattcctggcccaacagcctccggcttactttgccattttgccagctatatccgagatcagtgagagtctttccgtggacttcgatctcctaactgtcaacgccactgacgcagactcggagggtaataactcaaaggttatttatatcattgaacctgcccaggagggcttcactgtgcacccatcaaatggtgttgtgtctgttaatatgtctagattacagccggccgtatcctctagcggggattattttgtaagaattatagccaaggacgcaggaaaaccagctttgaaaagctcaacacttttgagagtacaggcaaatgacaacggttccggacgttcgcaattcctacagaaccaatatagggctcagataagcgaggcagctcctttgggatcggttgttctccagcttggacaagatgctctggatcaatccttagctatcattgctggaaatgaagaatccgcttttgagttgctccaatccaaagcaattgtcttggtcaagcctttggatagagaacgcaatgatctctacaaactgcgattggttttaagccatccacatggacctccacttatttcaagcttaaattcctcgtctggaatctcagtaatcataacaatcctggatgccaacgataacttcccaattttcgatcgaagcgctaaatatgaggctgagatcagcgaacttgctcctctgaggtactccatagcgcagttgcaggccattgatgccgatcaggaaaacaccccaaactcagaagtggtatacgacataacctctggcaatgatgagcatatgtttacgatagacttggtcaccggcgttctctttgtgaacaatcgcttggactacgattcgggggccaagagttacgagctgataatccgagcctgcgatagtcatcaccaaagaccactttgcagcttgcaaccctttcgattggaactccatgacgagaacgacaacgaacccaagttcccgctaactgaatatgttcacttcctggctgaaaacgagccggttggcagctccgtattccgtgctcatgccagcgatttggataagggacccttcgggcaattaaactacagcataggtcctgctcccagcgacgagagctcttggaaaatgttccaagttgattcggaaagtggtctcgttacatccgccttcgtattcgactatgagcaaagacagcgctatgacatggagctgctcgcctccgatatgggcggtaagaaggccagtgtggctgtgcgcgtagagattgagtcgagggatgagttcaccccgcagttcacagagcgcacctataggtttgtgctgccagccgccgtggccctgccccaaggctacgtggtgggtcaagtgactgccactgatagtgacagtggcccggacggacgagtggtctatcaactaagtgccccacactcgcatttcaaggtaaaccgtagcagcggggctgttctaatcaagaggaaactcaaactggatggcgacggagacggtaatctgtacatggatggtcgagatatcagtctagttatctcagcttcctcggggcgtcacaactccttatccagcatggctgttgtcgagattgccttggatcctttggcacatccaggcacaaacctggccagtgcaggtggttcgtcaggtggttccattggcgattgggcaattggtctactggtagcttttcttctagtcctctgcgctgccgccggaatctttctattcatccatatgagaagccgaaaaccgcggaatgcggtcaagcctcatcttgccacggacaatgctggtgtgggaaataccaatagctatgtggaccccagtgctttcgacacgatccctataagaggaagcatatcgggcggtgctgcaggagcggcatctggtcaattcgctcctccgaagtacgacgagattcctccgtttggagctcatgctggcagctccggagcagctacaacctccgagttgtcgggctccgaacagtccggttccagtggccgaggctctgctgaggacgatggggaggatgaggagattcgtatgatcaacgagggaccactgcatcaccgcaatggtggagctggggcaggcagcgatgatggccgaatttcggatatatctgtgcaaaacacccaggaatacttggctcgcctgggcatcgtagatcacgatcctagtggcgccggaggaggagcctccagtatggctggttcaagtcacccaatgcacttgtatcacgatgatgatgccacagcacggtcggatattacgaacctcatctatgccaaacttaatgatgtgacaggagctggttcagagataggaagcagtgcagacgacgcgggaaccactgcgggctccatcggaaccatcggaacggctatcacccatggacatggggtgatgagtagttacggagaagttcctgttccagtaccggttgtggttggcgggagtaatgtgggtggttccctgagctccatagttcacagtgaggaggaattgactggcagctacaactgggattacctattggattggggaccgcaatatcagccacttgcgcatgtgttttcggaaatagcgagactgaaagatgacaccttatcggagcacagtggaagtggggcttcctcgtccgccaagagcaagcactcttcctcacattcctcagcaggagcaggaagcgtggtgctcaaaccaccaccctcagcaccaccgactcacataccaccccccctgctaaccaatgtggcaccaagggccattaacctgcctatgcgcttgccaccccatttgagcctggcccccgcccatttgcccagatcgcccattggtcatgaggcgagtggcagtttcagcacatcatcagcaatgtcaccttcgttctcgccctctctatcgccgttggcaacaagatcaccatccatttctcctctgggagcgggaccacccacgcacctgcctcatgtctcgttgccacgccacggtcatgcccctcagccaagtcagaggggaaatgtggggacacggatgtaatcgagcactggagctgtatatccatccatatagtattaattgagccaccccactcacccatacacccacacaaacacagaagcacacatcgaaacactcacacttatttaaattgctgtatatataacatacattaccctctaagtaacgattgcagagcctatgtgccccactggaaagcccattatcgtattgcaaaacacattgtccttcgtggcgcacattacaaaaccaatcacttttaatttggctttaaaaatccaactaaccaacctaacccagttcctgtggggcaaggatgcactgcaatcgcagtaacgacaacaaagccaacaaagactctctgaaatgcgaggagcagcaggagccgggacagccatacgttgtaagcatttagagcctagaataacaaccgaactcgaaccgaatacactcgaatctgtatccgtagcttataagaatctataaactgtagctgtagcgtaggactaaactacttttatcggagcaaaccaagtgcacttaggcagcaggtcatccctgtttaaaggggatcagatccggctgcatctcacatttccattccaatccatatgacggtgagatgcgaaaaattgtaaaaagttgtttttagtaaccaatggggggaaaagaaaagaaacccttgtataaaactgaattgaaataacgaagcaaagaatgaaaacgaaatatatttaagtatttttttaggtataccctagttattagttattatatatgtacatgtaaagctatggatcatagtgtatgttcacttgtgtgtgatgctacttgtgtaattctttacgttctagcaaaaaactgtaaaaatgttaaacagtctaaggatccactatctgctaagccaatagtttgtattagctaaacgaaagcaagagaataaatatttaaataat

SEQ ID NO: 237 - protein, 3503 aa, Drosophila melanogaster
MLRSSLLILLAIVLLGSSQAASHDQERERKLEVFEGVAVDYQIGYIGDFGGIDSGPPYIIVAEAGVETDLAIDRATGEIRTKVKLDRETRASYSLVAIPLSGRNIRVLVTVKDENDNAPTFPQTSMHIEFPENTPREVKRTLLPARDLDLEPYNTQRYNIVSGNVNDAFRLSSHRERDGVLYLDLQISGFLDRETTPGYSLLIEALDGGTPPLRGFMTVNITIQDVNDNQPIFNQSRYFATVPENATVGTSVLQVYASDTDADENGLVEYAINRRQSDKEQMFRIDPRTGAIYINKALDFETKELHELVVVAKDHGEQPLETTAFVSIRVTDVNDNQPTINVIFLSDDASPKISESAQPGEFVARISVHDPDSKTEYANVNVTLNGGDGHFALTTRDNSIYLVIVHLPLDREIVSNYTLSVVATDKGTPPLHASKSIFLRITDVNDNPPEFEQDLYHANVMEVADPGTSVLQVLAHDRDEGLNSALTYSLAETPETHAQWFQIDPQTGLITTRSHIDCETEPVPQLTVVARDGGVPPLSSTATVLVTIHDVNDNEPIFDQSFYNVSVAENEPVGRCILKVSASDPDCGVNAMVNYTIGEGFKHLTEFEVRSASGEICIAGELDFERRSSYEFPVLATDRGGLSTTAMIKMQLTDVNDNRPVFYPREYKVSLRESPKASSQASSTPIVAVVATDPDYGNFGQVSYRIVAGNEAGIFRIDRSTGEIFVVRPDMLSVRTQPMHMLNISATDGGNLRSNADAVVFLSIIDAMQRPPIFEKARYNYYVKEDIPRGTVVGSVIAASGDVAHRSPVRYSIYSGDPDGYFSIETNSGNIRIAKPLDHEAKSQVLLNIQATLGEPPVYGHTQVNIEVEDVNDNAPEFEASMVRISVPESAELGAPLYAAHAHDKDSGSSGQVTYSLVKESGKGLFAIDARSGHLILSQHLDYESSQRHTLIVTATDGGVPSLSTNLTILVDVQDVNDNPPVFEKDEYSVNVSESRSINAQIIQVNASDLDTGNNARITYRIVDAGVDNVTNSISSSDVSQHFGIFPNSGWIYLRAPLDRETRDRYQLTILATDNGTPAAHAKTRVIVRVLDANDNDPKFQKSKYEFRIEENLRRGSVVGVVTASDLDLGENAAIRYSLLPINSSFQVHPVTGEISTREPLDRELRELYDLVVEARDQGTPVRSARVPVRIHVSDVNDNAPEIADPQEDVVSVREEQPPGTEVVRVRAVDRDHGQNASITYSIVKGRDSDGHGLFSIDPTSGVIRTRVVLDHEERSIYRLGVAASDGGNPPRETVRMLRVEVLDLNDNRPTFTSSSLVFRVREDAALGHVVGSISPIERPADVVRNSVEESFEDLRVTYTLNPLTKDLIEAAFDIDRHSGNLVVARLLDREVQSEFRLEIRALDTTASNNPQSSAITVKIEVADVNDNAPEWPQDPIDLQVSEATPVGTIIHNFTATDADTGTNGDLQYRLIRYFPQLNESQEQAMSLFSMDSLTGALSLQAPLDFEAVQEYLLIVQALDQSSNVTERLQTSVTVRLRILDANDHAPHFVSPNSSGGKTASLFISDATRIGEVVAHIVAVDEDSGDNGQLTYEITGGNGEGRFRINSQTGIIELVKSLPPATEDVEKGGRFNLIISAKDHGQPEPKKSSLNLHLIVQGSHNNPPRFLQAVYRATILENVPSGSFVLQVTAKPLHGAENANLSYEIPAGVANDLFHVDWQRGIITTRGQFDRESQASYVLPVYVRDANRQSTLSSSAVRKQRSSDSIGDTSNGQHFDVATIYITVGDVNDNSPEFRPGSCYGLSIPENSEPGVIHTVVASDLDEGPNADLIYSITGGNLGNKFSIDSSSGELSARPLDREQHSRYTLQIQASDRGQPKSRQGHCNITIFVEDQNDNAPRFKLSKYTGSVQEDAPLGTSVVQISAVDADLGVNARLVYSLANETQWQFAIDGQSGLITTVGKLDRELQASYNFMVLATDGGRYEVRSATVPVQINVLDINDNRPIFERYPYIGQVPALIQPGQTLLKVQAIDADLGANAEIVYSLNAENSAVSAKFRINPSTGALSASQSLASESGKLLHLEVVARDKGNPPQSSLGLIELLIGEAPQGTPVLRFQNETYRVMLKENSPSGTRLLQVVALRSDGRRQKVQFSFGAGNEDGILSLDSLSGEIRVNKPHLLDYDRFSTPSMSALSRGRALHYEEEIDESSEEDANNSTRSQRALTSSSFALTNSQPNEIRVVLVARTADAPFLASYAELVIELEDENDNSPKFSQKQFVATVSEGNNKGTFVSQVHAFDSDAGSNARLRYHIVDGNHDNAFVIEPAFSGIVRTNIVLDREIRDIYKLKIIATDEGVPQMTGTATIRVQIVDVNDNQPTFPPNNLVTVSEATELGAVITSISANDVDTYPALTYRLGAESTVDIENMSIFALDRYSGKLVLKRRLDYELQQEYELDVIASDAAHEARTVLTVRVNDENDNAPVFLAQQPPAYFAILPAISEISESLSVDFDLLTVNATDADSEGNNSKVIYIIEPAQEGFTVHPSNGVVSVNMSRLQPAVSSSGDYFVRIIAKDAGKPALKSSTLLRVQANDNGSGRSQFLQNQYRAQISEAAPLGSVVLQLGQDALDQSLAIIAGNEESAFELLQSKAIVLVKPLDRERNDLYKLRLVLSHPHGPPLISSLNSSSGISVIITILDANDNFPIFDRSAKYEAEISELAPLRYSIAQLQAIDADQENTPNSEVVYDITSGNDEHMFTIDLVTGVLFVNNRLDYDSGAKSYELIIRACDSHHQRPLCSLQPFRLELHDENDNEPKFPLTEYVHFLAENEPVGSSVFRAHASDLDKGPFGQLNYSIGPAPSDESSWKMFQVDSESGLVTSAFVFDYEQRQRYDMELLASDMGGKKASVAVRVEIESRDEFTPQFTERTYRFVLPAAVALPQGYVVGQVTATDSDSGPDGRVVYQLSAPHSHFKVNRSSGAVLIKRKLKLDGDGDGNLYMDGRDISLVISASSGRHNSLSSMAVVEIALDPLAHPGTNLASAGGSSGGSIGDWAIGLLVAFLLVLCAAAGIFLFIHMRSRKPRNAVKPHLATDNAGVGNTNSYVDPSAFDTIPIRGSISGGAAGAASGQFAPPKYDEIPPFGAHAGSSGAATTSELSGSEQSGSSGRGSAEDDGEDEEIRMINEGPLHHRNGGAGAGSDDGRISDISVQNTQEYLARLGIVDHDPSGAGGGASSMAGSSHPMHLYHDDDATARSDITNLIYAKLNDVTGAGSEIGSSADDAGTTAGSIGTIGTAITHGHGVMSSYGEVPVPVPVVVGGSNVGGSLSSIVHSEEELTGSYNWDYLLDWGPQYQPLAHVFSEIARLKDDTLSEHSGSGASSSAKSKHSSSHSSAGAGSVVLKPPPSAPPTHIPPPLLTNVAPRAINLPMRLPPHLSLAPAHLPRSPIGHEASGSFSTSSAMSPSFSPSLSPLATRSPSISPLGAGPPTHLPHVSLPRHGHAPQPSQRGNVGTRM

SEQ ID NO: 238 - DNA, 1353 bp, Drosophila melanogaster
atgagtggcaagcaggtagtcatccttctgggcagtgtcctgatcctgggatgcttacaagtggcagcggcaacggaaacggataacaaaaccaacgatttcgtggccaccgacgaatggcagacgattgcggaaggttaatggctagccaggctaactctcggatgacgtgtactaagtgagcactctatatttccaggtcaagctattccaaggggcctgcacgtgcgcatcaacctacaaacggggctcaaggaagccaaactcttagacgaaagcgaacgtggcacgtcgctgcagagtcaaccggatgatcagaatgctcgggaatctcacgatgacaacgaacccctggctctggactataaaccggacataatcgaggagtctatacggcgggtcaaggagcagaagaagagctatgccgagctacgcaaagcgtacaaagagttccagaagaactttcgcaccgacggagaactgatcgtccagttaatcgatcagtttcggaacttcagcagaacgccgctagagtcagagatgcgctccaagctggactgcctggaaaatctggagtatttgctccatcagatagacaatgccttgatgttcattgataatgggggattggatgatgtactactgcccattgttgtgaacgataccagtacatccctgagagtgtcggccatgcgtgtgttgggctcgctggcgagcaacaatcccaaggcccagatcaaggtgttcgaaaagaatttcgggtctcatctggctcagattctgaccagttccggaaatgtcggtgagatctccgctgcattgcacgcctttggagccttgttgcggaaatttccgctagcccagcagcgagtgctttccacctcgggtacacaggctctgatcaaggtgctccagagtccggatgtggagctgcggagcaaggcgaaggtagtgactctcataagcgacctagtgctggagaagcggtcagtgctggatgtcagcaaagatgatcccgaagcctcatccacaatggcgcaatatgtgctcttggacttcgagtcgtggctgaaaacgccgggctactgcgcggcggtggacactgtgctaaccaaggagttcctgctcctcctagagcaaccggaggtggtggaacagtttgccaccgcattggagaccaccgaagatatgtgcaccagcacgtggtcgcaaagttccggtctcaggcatgcactattaaccgttcgcaatcggtatgccaacagcacggacgagtaccgactggaggtgtcccagattttggccaaactgtgcgagagattgttcaacaagcccaagcacaccgaactgtaa

SEQ ID NO: 239 - protein, 429 aa, Drosophila melanogaster
MSGKQVVILLGSVLILGCLQVAAATETDNKTNDFVATDEWQTIAEGQAIPRGLHVRINLQTGLKEAKLLDESERGTSLQSQPDDQNARESHDDNEPLALDYKPDIIEESIRRVKEQKKSYAELRKAYKEFQKNFRTDGELIVQLIDQFRNFSRTPLESEMRSKLDCLENLEYLLHQIDNALMFIDNGGLDDVLLPIVVNDTSTSLRVSAMRVLGSLASNNPKAQIKVFEKNFGSHLAQILTSSGNVGEISAALHAFGALLRKFPLAQQRVLSTSGTQALIKVLQSPDVELRSKAKVVTLISDLVLEKRSVLDVSKDDPEASSTMAQYVLLDFESWLKTPGYCAAVDTVLTKEFLLLLEQPEVVEQFATALETTEDMCTSTWSQSSGLRHALLTVRNRYANSTDEYRLEVSQILAKLCERLFNKPKHTEL

SEQ ID NO: 240 - DNA, 990 bp, Drosophila melanogaster
tactacgacgaggtcgacccgacgcaccgggagaagacgacgaaccaatcgccacggagcttaaaggcactcaggaaaccggttgttagggtcacgaagcgattagcggtcgaataggaacgtcgagggcttgacggcgcgacggtgtacccgctgtggtcgacgtagtagttgcacagcgtgtacgactagtctgtcgtgcgctcctggccgataggcaggcgacctaagggggtccacctcgggaaggactagttcgcgaagctgtagaggctgcctgcgtgaccgagggacttagatttcgagttgaagtccctgcacttacacctcccggacaggtcacacttcaagctgtctcggcacattcatcgttcactttacttttcactaaaggaagaattcgttttcacttcttcaagagtacaaataattgtcttcttctatataattcaactaacgtgaataggtagtattagcataaaaagtcaccgaaaccgcgactaggacgttggtcgttcaaactctacatgcctaggaaagggttctagcacgacttcccgttcatgcaccgcctacctgcgtaggactaggacggctaagcaccgctaccgctacggctctagcacaacgtgttagggttcaaaagccactttaagttcggcccgtgtgtcgtcgcgttacctgcgtggatggactcgcacctattcgagttccaagaccacctcggtgttttcatccacgtcaagcctaaaatcgactctatatgattgtataaacacaagggtgtcctacttgtaagccgacctcttggagaaattaccgctggtccgtaacccgtggttagacttagtcaaggagttgctgttgacctgcctccacaccttgctcgacgtagggaggtaagtacaccggtagcggctctagtacttctcgcaagagagcgtcgagaagttcgcgaagcggatgctcctaaataaggagctcttgact

SEQ ID NO: 241 - protein, 269 aa, Drosophila melanogaster
MMLLQLGCVALFCCLVSGASNFRESFGQQSQCFANRQLILAAPELPRCHMGDTSCIINVSHMLIRQHARTGYPSAGFPQVEPFLIKRFDISDGRTGSLNLKLNFRDVNVEGLSSVKFDRAVGFGADPATSKFEMYGSFPKIVLKGKYVADGRILILPIRGDGDAEIVLHNPKFSVKFKPGTQQRNGRTYLSVDKLKVLVEPQKMNIRLENLFNGDQALGTNLNQFLNDNWTEVWNELHPSIHVAIAEIMKSVLSQLFKRFAYEDLFLEN

SEQ ID NO: 242 - DNA, 1521 bp, Drosophila melanogaster; identical to SEQ ID NO: 198

SEQ ID NO: 243 - protein, 440 aa, Drosophila melanogaster; identical to SEQ ID NO: 199

SEQ ID NO: 244 - DNA, 2400 bp, Drosophila melanogaster
ggtgacagcggagcggcttcgcagagctgcattaaccagggcttcgggcaggccaaaaactacggcacgctccggccacccagtccgccggaggactccggttcagggagcggccaactagccgagaacctcacctatgcctggcacaatatggacatctttggggcggtcaatcagccgggctccggatggcggcagctggtcaaccggacacgcggactattctgcaacgagcgacacataccggcgcccaggaaacatttgctcaagaacggtgagtttctattcgcagtcggctgatctgtgtgaaatcttaataaagggtccaattaccaatttgaaactcagtttgcggcgtggcctatccgggcgaacttttggccgtgatgggcagttccggtgccggaaagacgaccctgctgaatgcccttgcctttcgatcgccgcagggcatccaagtatcgccatccgggatgcgactgctcaatggccaacctgtggacgccaaggagatgcaggccaggtgcgcctatgtccagcaggatgacctctttatcggctccctaacggccagggaacacctgattttccaagccatggtgcggatgccacgacatctgacctatcggcagcgagtggcccgcgtggatcaggtgatccaggagctttcgctcagcaaatgtcagcacacgatcatcggtgtgcccggcagggtgaaaggtctgtccggcggagaaaggaagcgtctggcattcgcctccgaggctctaaccgatccgccgcttctgatctgcgatgagcccacctccggactggactcctttaccgcccacagcgtcgtccaggtgctgaagaagctgtcgcagaagggcaagaccgtcatcctgaccattcatcagccgtcttccgagctgtttgagctctttgacaagatccttctgatggccgagggcagggtagctttcttgggcactcccagcgaagccgtcgacttcttttcctagtgagttcgatgtgtttattaagggtatctagtattacataacatctcaactcctatccagcgtgggtgcccagtgtcctaccaactacaatccggcggacttttacgtacaggtgttggccgttgtgcccggacgggagatcgagtcccgtgatcggatcgccaagatatgcgacaattttgccattagcaaagtagcccgggatatggagcagttgttggccaccaaaaatctggagaagccactggagcagccggagaatgggtacacctacaaggccacctggttcatgcagttccgggcggtcctgtggcgatcctggctgtcggtgctcaaggaaccactcctcgtaaaagtgcgacttattcagacaacggtgagtggttccagtggaaacaaatgatataacgcttacaattcttggaaacaaattcgctagattttagatagaattgcctgattccacacccttcttagtttttttcaatgagatgtatagtttatagttttgcagaagataaataaatttcatttaactcgcgaatattaatgagatgcgagtaacattttaatttgcagatggttgccatcttgattggcctcatctttttgggccaacaactcacgcaagtgggtgtgatgaatatcaacggagccatcttcctcttcctgaccaacatgacctttcaaaacgtctttgccacgataaatgtaagtcatgtttagaatacatttgcatttcaataatttactaactttctaatgaatcgattcgatttaggtgttcacctcagagctgccagtttttatgagggaggcccgaagtcgactttatcgctgtgacacatactttctgggcaaaacgattgccgaattgccgctttttctcacagtgccactggtcttcacggcgattgcctatccgatgatcggactgcgggccggagtgctgcacttcttcaactgcctggcgctggtcactctggtggccaatgtgtcaacgtccttcggatatctaatatcctgcgccagctcctcgacctcgatggcgctgtctgtgggtccgccggttatcataccattcctgctctttggcggcttcttcttgaactcgggctcggtgccagtatacctcaaatggttgtcgtacctctcatggttccgttacgccaacgagggtctgctgattaaccaatgggcggacgtggagccgggcgaaattagctgcacatcgtcgaacaccacgtgccccagttcgggcaaggtcatcctggagacgcttaacttctccgccgccgatctgccgctggactacgtgggtctggccattctcatcgtgagcttccgggtgctcgcatatctggctctaagacttcgggcccgacgcaaggagtag

SEQ ID NO: 245 - protein, 663 aa, Drosophila melanogaster
GDSGAASQSCINQGFGQAKNYGTLRPPSPPEDSGSGSGQLAENLTYAWHNMDIFGAVNQPGSGWRQLVNRTRGLFCNERHIPAPRKHLLKNVCGVAYPGELLAVMGSSGAGKTTLLNALAFRSPQGIQVSPSGMRLLNGQPVDAKEMQARCAYVQQDDLFIGSLTAREHLIFQAMVRMPRHLTYRQRVARVDQVIQELSLSKCQHTIIGVPGRVKGLSGGERKRLAFASEALTDPPLLICDEPTSGLDSFTAHSVVQVLKKLSQKGKTVILTIHQPSSELFELFDKILLMAEGRVAFLGTPSEAVDFFSYVGAQCPTNYNPADFYVQVLAVVPGREIESRDRIAKICDNFAISKVARDMEQLLATKNLEKPLEQPENGYTYKATWFMQFRAVLWRSWLSVLKEPLLVKVRLIQTTMVAILIGLIFLGQQLTQVGVMNINGAIFLFLTNMTFQNVFATINVFTSELPVFMREARSRLYRCDTYFLGKTIAELPLFLTVPLVFTAIAYPMIGLRAGVLHFFNCLALVTLVANVSTSFGYLISCASSSTSMALSVGPPVIIPFLLFGGFFLNSGSVPVYLKWLSYLSWFRYANEGLLINQWADVEPGEISCTSSNTTCPSSGKVILETLNFSAADLPLDYVGLAILIVSFRVLAYLALRLRARRKE

SEQ ID NO: 246 - DNA, 2504 bp, Drosophila melanogaster
aattgcttttaaaccacgaaccgctgaacaaggtacggagtttgtaaaatacttaatattagctaagtccgtgcgagcgtagccaaacaaggaaactaattccaacgctgccgtgacacaaacttccgtacgaaattgaaagtcaaatgaattctgtacaaaactgtgtgtgtgcgtgtaattcaagcgtcaatttgtcgatgataaaatttgcctgcgcctaatgtacacatgtctgcgtcttcgttgagcatatgagcctgtgaatgtgtgcgtatcggtgtgagcgtcgagcataagaaagcagcacaaaacaacaacaacggcagcagcagcaacaacaacagcaagaaggcaacgacgctaagagaaagagagaaggaagggaagagcagagcataatcggactccattttacaaggcgaaaaaaggagtaggaaagagcgcaccatggccagtttccagatccaccaagacatgagcaacaaggagaatccgggcattaagattccggccggagtgaagaacaccaagcagccgctggccgtaattgggggaaaagcggagaaaaatgcgcttgcgccgcgggccaatttcgccgtgctcaatggcaacaacaatgtgccgcgtccggccgggaaagttcaggtcttccgtgacgtcagaaatcttaatgttgatgagaatgtggagtacggcgccaagaaatcgaatgtggtgcccgtggtggagcaattcaagaccttctccgtgtatgaggacaacaacgatacccaggttgcgccatccggcaaatccctggcctccctagtcgacaaagagaaccatgacgtgaaattcggtgctgggcagaaggagctggtagactacgatctggattcaacacccatatccgtgacggatgttcagtcccccatgtccgtggaccgctccattctcggtgtcatacagtccagtgatatcagcgtgggcactgaaacgggagcctcgccaactggaagagtcaaggagcttccgccgcgcaacgatcgtcagcggttcctggaaatggttcagtaccagatggacattctggaatatttccgggagagcgagaagaaacatcgccccaagccactctatatgcgcagacagaaggacattagccacaatatgcgctccatccttattgattggctggttgaggtttccgaggagtacaaactggacacggagacgctctatctctcggtcttttatctagatcgatttttgagccaaatggcggtggtgcgctccaagttacagctggtgggcacggcagctatgtatattgccgcaaaatacgaggaaatctatcccccagaggtcggtgagtttgtcttcctcaccgacgacagttacaccaaggcgcaggtgctacgcatggagcaggttatcttgaagattctctccttcgatctgtgcacaccgactgcttacgtcttcatcaacacctatgctgtactttgcgacatgcctgagaagctgaagtacatgacgctgtatatttccgagttgtcgctcatggagggagaaacgtacttgcaatatttgccatcacttatgtcatccgcttcagtcgcactggcgcgtcacattttgggcatggagatgtggacgccacggctggaggagatcacgacttacaagctggaggacctaaaaacggttgtgttgcatctgtgtcacacccacaaaacggcaaaggagctcaacacgcaggccatgcgggaaaagtacaatagagacacttacaagaaggtggctatgatggaatccgttgagatgagcaaggacgacttcgatcagctctgtgaggcttacaattgcaagcagaaagaggatgagcaacagcagccggatattaatactaaatcgaacgtgaatttgttttataagttttaagtgttttgagccgctgtcatggccaaattgtatattagtttagtgtttccatgtaacattatgtagttttagttgtaagtgtacacaatggatcaattgcagttcggtcgcagtcagccagtcgtataaaagcttcgcattggttggccgattgacaagctcccgttgcaagtgccggacaattttatatgtaagccatataaaagatagttgccaaaatatacgcgcacttttcgcttaacaacattcgcgtctgtccacggtgagagcttgtcatgccaagcgggagcagtaagaacttcggcagtcttaaaaactatccgattagccaattgaaattggaggaagccaccggacacaacatattagtgctgcttatgctaacgatattttatatttcaacctctttatgttaagtatgtatgttttcgtgtttataaattgaaccatactaacgtatacaatgtgtctaaagcagaaacagctagcttcgagaattattttaccatatttatatattactatttactccgtaaatgttctgtgaactccaaaacaaatatatacacaattttaac

SEQ ID NO: 247 - protein, 491 aa, Drosophila melanogaster
MASFQIHQDMSNKENPGIKIPAGVKNTKQPLAVIGGKAEKNALAPRANFAVLNGNNNVPRPAGKVQVFRDVRNLNVDENVEYGAKKSNVVPVVEQFKTFSVYEDNNDTQVAPSGKSLASLVDKENHDVKFGAGQKELVDYDLDSTPMSVTDVQSPMSVDRSILGVIQSSDISVGTETGVSPTGRVKELPPRNDRQRFLEVVQYQMDILEYFRESEKKHRPKPRYMRRQKDISHNMRSILIDWLVEVSEEYKLDTETLYLSVFYLDRFLSQMAVVRSKLQLVGTAAMYIAAKYEEIYPPEVGEFVFLTDDSYTKAQVLRMEQVILKILSFDLCTPTAYVFINTYAVLCDMPEKLKYMTLYISELSLMEGETYLQYLPSLMSSASVALARHILGMEMWTPRLEEITTYKLEDLKTVVLHLCHTHKTAKELNTQAMREKYNRDTYKKVAMMESVEMSKDDFDQLCEAYNCKQKEDEHQQPDINTKSNVNLFYKF

SEQ ID NO: 248 - DNA, 8577 bp, Drosophila melanogaster
atgtccaccgccgttgaaacggggtcgtcgcctgccaagagcaatagcaacaacagtagcagtggcggcaacaacaacaacggcaacggcaatctcagtccaaatgcaaaaggcgtgcagcggcgtcaactggtaagtaccgccgcacccccacttttacctttcaccccccgccccctcccttcctcactatcaataaccgataaagccacgacaacctacagtcgtacttccctagggtgcatttgttaagtttcactcgataaatcgaactaacaggaccagctgtgtaagaccgaaaaataggtggaaatttattttgtttgttgccgccagatgttcaaatttattaattcagtgctctgataacccggaataatcgagttaactaacacctcccattaggaaagatatgtatagttgacttaaataagtcaaaagaagctgctcaattacgtacgttttcctaagttacaagccggctctacttagccgcccatgtgggtggttcgccatacggaaattcacctgtaagcatgaacgataagcccgccgtgccgagccctaataacttgatgatcagcgaaggcaaggagtgcgagcgagagatagcaaataggttgtggaagcgaacgtaaaactcatcattaatcggtggaaataaaatgcattctcacccaaccgccccgccctctgcctctctcgcccactattcttgttttatttttcttttccgctgcctctttaattttcatttgcgcccgttgagcattggagctcaactgaggccgcatgaccgaaagcaatgagctttatttgccatattcgctgtttgttattctcttcttctggctattattgccattgttgttgtttgactcgcatttcgttttcaatttgccgctggtgtgtgtgcgtgtgtgtgcttgcgagcgagcatatgtgttggctagggtgctggtgggtttgtgtgtggtgtgtttctgcttcggtttctattccatatcgtagataacagggcattgttgcgttgttgttgcccaacatatttacatacggagtggaagaggaagcgagagaggaagagcgggagtagtgctgacgttgacacacagagaacaaaaagtcaaaccaaaagcctttcgaatatatcaatttatatctgaaatataatatatagaatgcaatgcaatttcttgtgttgaacattaaacctcagccccacatcgcgtctgtatagttttgtttcagtgctgaaaagtgatacgtgggcgtgggtatccgtggcgggggttttgcgtcaggggggtgcctcagtgatttcatatcgtcagccaacttgcaaagttcacgttcacagttccctcggcctgcgcatttgattagcaccaaaattggatcaacagctgctggggctcgtcgccttgccatccgttcgctgtgagcggtgacgaagaattcccgcccggcacttgtcgacggaatcttgcgtccccccctgccgcacgcaattataccctaccatcaaggggtatctatgtgcatcactcttctgggagtaacatgttcatactcacttgatcataacctcatgtaacacgtgaccatctcaacagaatcatgaattctgaaaaaaactagtgaatttcactcaaacgtggcgcgctgggtatcttttttcttatcctatctctttcggaagcaatctaaccaaatatcaaccttacgattatctcctgggacaggaaagtaattaattcacactgcagggtatctaagcagtcgctagtgcagcctatttcccactaacttgggtatctatgcatactgaagtggagcgcagggaagcaggcgggaggagtgagctcctattaaaaatgtagggattgctggggagtggaaaggcgaactctcattatggtgactaacgtggagaattatagggggctagcggaacgaggagcacgctgagcacatggcagataagggtccgcaattagcaccttaaatagaatacattagggtgcccaggtggccacctgatgggtgggggttggggtggtgtggcgaaggtgacgccaccacagcaagaatccgaaaccacttgactggatttggattttggttttctgtcttacacgcaactttttatgtggtcgcggctgtcgttgttgttgttgattcctctcttacacggaaagaaaaatctgatttaatagatcatttgaaatgccaagtgaaaatattgtcatctaaaagtataatttcgataatacccaaacgtattatattacataagtaaatatcttaaaataatttgaatgcttaaatgtgtgcgcgaaaaaatgaacaattatttaaacctgctgttttttcagtgtgctttttcgactgtcgttgtttttgttgcttctcttacctgccgattgttaatcggccagacaccaaaacaagcttttgagccgaggaaaaaacaaaaacaatcgcgcggcagcaacagcgtggccacaatgaaaagtcactaaaaatcgtttagaacatgccaaacaagtttcaacatttctgtggggcaagccgcttaaaaaggatatgccacacacacacacacactcgcgcggatacaaacaagcacaaacacaaacgagggcaggcgcatccatgtttatagatttttcgttgcaaaaccgtcgctcgaaccgcccatcaccccctggctaacccaacccctctccacctgcccctgccaccttactcgcagcggccaaaataaactcaaagcaggagacatggcaataaattccgtatttcgtattccgaatttgttgttccttggagcaacagtctctcatctcaatccccattgcatttctcaatctcttagattctttgcctctctgccggcactctcgatgcaccaccaccagtgcagaaaataaagcaagaaaaagaatcaacaaagcattcgcatgcaaagtgcatgcgcactggagggagatagcaacagcaacaggggagcgagcgagagaccaagagcggagcaggtcgtggtggacaacgcgaatcccgttgccctctgtcaagcaggcctgccaccctttgggtgatacggaaaagcctaccctaccgagactattattgaaggaaatatatatggggcggaaaggcataattgaaagcattgaagcaagtgtttaccttaagaatcccatttatataagtaagcaccaactacttgtatgttacttaaataatcaagaaatataagccgcatggtttgctgggtaaatagtgaaaccaaatggttaccgtgcaataattgcctatgtatgtatgtacatatgtaaactgccgggaaacgcaagtaagacgtccgaatcaatggaaaacggacatacctttggtaaaaactcatcaactattgtcaaaaatctgtgaaaacattaattcgatcctaagacaatcaacatattttcgaattttcaagtacccccaaaaagatatgcgtattatttttgaattttattttgaaatcgaacgtactagcggcgtggccgaaaattgccgattgaaaaaatgtgggcatagcatgttgcttaaatagatttttgtttgctcgctcttgtcatcgatgctctcccatttagtcgctctctctgaatttgtttgactctccgtatctctctcgagatactccctctctaattaggttcgtcggttgtagccgttaggaaatctcacgctcacaaatttgaatccatttggccccaccaggtgatgaatatataaatcaatcaaaataagcttgtctgttcaatctatttattctctttgagtctcgaacgaatttcgttgtcttataaacaataaaattttaaactaatttctaaaataaaataaaaccatttagtcattttttttacttataataggataataggataaaatataaatggatatggtgtatatttgaaaatacattttttccaaaactaaacgatagttttcaaaatattgacatccctatcggcgagcaaatgaaatcgaaattacagaggcgagagagtcatccaagcgactggagaaagtgaaggcgagggtcgcagggagagtgagcgggtgggtctaaagagcaaatcaccgtggtgaagagagtgacaagtgaatcatatcgatggcgtcagcagagtcgctggcggaggcagcggcagaggcagcgccttccgttttgacggtgtatttttagtacttcactcactcaaacacaacatcaaccgaatctgactctcttctttctttttgcagcgcgagaggaagcagcgcaagctctacctggaggaatggtcgctgggcgacgaggatggcgaggggacgcggggattcagcgttgccgagaagctcgaatcttcaaagttcgcgcaggcgggaatggtgcgcgagatgcgcggatgcgatctcaccgtagcgtaagtatctcaagcttttgcagtatttatcgcttgctaatcggcggtgattatcggtttgccatttaacggatatgtttcgcgttgttttatgacctacattaaacgacggatatagtatacctacgagaaagagagattaatttgtttatgtctattttaaatagcttttatgtacatacagatttatgttgctagttaatcctaaacttatattgggtttttgttgcttcatgcagtttcctccaacagcacggctttaacatcccgctgttattccgggacaaagcgggcttaggtttacgaatgcccgatccgcaggagttcaccgtgaacgatgtgcgactgtgcgtgggatccaggcgactcctcgatgtcatggacgtgaacacgcagaagaacctgcagatgaccatgaaggagtggcagcagtactatgacagtccgcagaaagaccgtctgctaaacgtgatctctctggagttctcgcacacccgcctggacagattcgttcagagtccggagatcgtgcgccagatcgactgggtggatgtggtctggcccaagcagcttaaggacgcccagcgggagggcaccaatctgctaggcggcatgatgtacccaaaggtgcagaaatactgcctgatgtcagtgaagaactgctacacggattttcacattgacttcggtgggacttccgtttggtatcacatcttaagaggaagcaaagtattttggctaattccacccacggaccgtaatctgcagttgtatgaaaagtgggttctctctggcaaacaggcagacattttcttcggagatacagtggagaaatgtgccagggtttatttaaccgcggggaacaccttcttcatacccaccggctggatacacgcagtctacacgcccacccaatccctcgtctttggaggaaatttcctgcactccttcgggatagtgaagcaacttaaaaccgccagtgttgaggatagcacgaaagtgccgcagaagttccgatatcccttcttcacggagatgctgtggtacgttcttgctcgctatgttcacacgctactgggccactcacatctggaaggtgaggcctcgttgagcgaggatgaaatggctgcccgtccgcatacccatcttacgcaccacgagctctttggactgaaggagatcgttatgtatttgtacgatctgccgccgcagaagaaaaatgtgcccagcctggttctggatcctgtggccctgatcaaagacgtccgatcgttggtcgagcgtcactgcaaggatcagcaagatctcgcgattactggcgtgtcagtgttaaagtcgccaccaggatcgcagccccccttcttgttgtatgatcgcacacgcgtgaaacaggagataaagcaggaaattgcacgcaagaatgcagaggtaatacgggaacaacagcaattggaggcgggcagggccagggaggccgaatcggatacatctcaatccactggagtgggatcagtcatcggaatgggggccggagtcgagtacagtaacggagttatgaagaaggagcaattggagaacggtagcggagtaacagttggcgggcacggatcacagccaggtgcgttgtaaaatgtttatttattttgcacagtaagagtaatactgttcttattttacagaggccacctttgccctgcccaccgatacgcttaagtatcgcccacccaagaaaatgcatttggccacggcgttggtggcagccgctgcaagcagcagctctggaggaggcggaccagttgcaggagtgggaggatccgcggtggtgggaagcagccatagtcctaccggcggaggagtgggcccagtcacaggagcaggcggtgctattagtgtgattgccaccagctccagctacattgaaggaggacaagttggaggaattctcaacatggacaattgtcattctccagaagggggtggcgctaaactgtctccaaatcttaccggtactggacaaccaagacgtcgcaggacgcgctgcaagaactgtgccgcctgccagcgctccgactgcggcacctgtcccttctgtatggatatggttaagtttggtggacctggtcgggccaagcaaacgtgcatgatgcgacaatgtctatcgccaatgctgccggttacagcgcagtgtgtttactgtcatctggatgggtggcgtcagacaccagtctctccgcagaccaagcaactggcttccgccgatgggccctccgctctaatggagtgttccgtgtgctacgagatcgcccacccggactgtgctctctcgcagttagatggcacagaggatgcggcggacgccaagggaatcgtaaatgaagatctgccaaacagttgggagtgtcccagctgctgccgctctggcaaaaactatgactataaggtacgattaccatcaacacatgtttctttagtcttagtgcaacttactaatccaacctttattgtacagcctcgccattttcgagcacggcaaaagtcctccgaagtgcgtcgcgtttctgtttcccatggtcaaggaggcgccgaaggccacgcggatggaaatacattgctgccgcccccggtgggccagtataatgactttgtcttcaccagtgagtcggaaatggaatcgggtactgtcagtggccacatgacacattggaaacacggaatgaagcgccaccatcagctggaggttaaaacggagcgaaataatagctgcgacaccccatctcccggcatttcaccaaatgccattggcggcgactccaaagtaggaaagcggcgtaagagcgacgacggaacgagcgttagtagcagcatgcacgagagtaatgacgccccatgtggctcttcggcggagggagcaggtggagcgggaaatgcaaatgtatccactaatcagtggagtggcagtggcggcggaggtggttcccgcaagaagaactcaatacgatcacagctggcccagcaaatgctgaactcgtcgacccgagtcctcaagaaaccccaatatgtcgtgcggccagcaagtggaaccggttcgtcttcgtccagtggaaatggaggtagcgcatccgccaccaacggaatcagcaatggcagcaatcaaagcggtgcaaactcctgtggagctggcaacggcgagcgaggaaccaataacggaggattgagcggctcaaacggcttgggcaatcagcattacagttcatcacaaaatctggcgttggacccaactgtgctgaagatcatatttcgttaccttccgcaggacacgctggttacctgttgctcagtatgtaaggtatggtcgaacgcagcggtcgatcccgatttgtggaagaaaatgaattgctcggagcacaagatgtcagcatcacttttgacagcgattgtgcgcaggcagccggagcatcttattttggactggacgcagattgccaagaggcagttggcgtggctggtggctcgcctcccggcgctcaagaatctctcgctgcaaaactgtcccatccaggcagtgttggcactgcacacctgcctttgtccaccgcttcaaactctggatctcagctttgtgagaggattgaacgatgctgcaataagggacatcctttcacctccaaaggattcgcgacctggcttaagtgactcgaagacgcgtctaagggatcttaaagtaatgaagctggccggaacagatatctccgatgtggctgtgcgctatatcacgcagtcgttaccgtatctgcggcatctggatctctcctcctgccaacgaatcacggatgcgggcgtggcacaaataggaacctccaccacagccaccgctcgtctcacggagcttaatctgagcgcctgcaggcttgtgtctgagaacgctctggagcacctggccaagtgcgaaggtctcatctggctggacctgcgccatgtgccccaggtcagcacccagtcggtgattcgctttgcaagcaactccaagcatgatctttgcgtcagagacatcaagctggtagagcgaaggcggaggaactcgacgacagcaaaccgaagctggcaccacgactga

SEQ ID NO: 249 - protein, 1345 aa, Drosophila melanogaster
MSTAVETGSSPAKSNSNNSSSGGNNNNGNGNLSPNAKGVQRRQLRERKQRKLYLEEWSLGDEDGEGTRGFSVAEKLESSKFAQAGMVREMRGCDLTVAFLQQHGFNIPLLFRDKAGLGLRMPDPQEFTVNDVRLCVGSRRLLDVMDVNTQKNLQMTMKEWQQYYDSPQKDRLLNVISLEFSHTRLDRFVQSPEIVRQIDWVDVVWPKQLKDAQREGTNLLGGMMYPKVQKYCLMSVKNCYTDFHIDFGGTSVWYHILRGSKVFWLIPPTDRNLQLYEKWVLSGKQADIFFGDTVEKCARVYLTAGNTFFIPTGWIHAVYTPTQSLVFGGNFLHSFGIVKQLKTASVEDSTKVPQKFRYPFFTEMLWYVLARYVHTLLGHSHLEGEASLSEDEMAARPHTHLTHHELFGLKEIVMYLYDLPPQKKNVPSLVLDPVALIKDVRSLVERHCKDQQDLAITGVSVLKSPPGSQPPFLLYDRTRVKQEIKQEIARKNAEVIREQQQLEAGRAREAESDTSQSTGVGSVIGMGAGVEYSNGVMKKEQLENGSGVTVGGHGSQPEATFALPTDTLKYRPPKKMHLATALVAAAASSSSGGGGPVAGVGGSAVVGSSHSPTGGGVGPVTGAGGAISVIATSSSYIEGGQVGGILNMDNCHSPEGGGAKLSPNLTGTGQPRRRRTRCKNCAACQRSDCGTCPFCMDMVKFGGPGRAKQTCMMRQCLSPMLPVTAQCVYCHLDGWRQTPVSPQTKQLASADGPSALMECSVCYEIAHPDCALSQLDGTEDAADAKGIVNEDLPNSWECPSCCRSGKNYDYKPRHFRARQKSSEVRRVSVSHGQGGAEGHADGNTLLPPPVGQYNDFVFTSESEMESGTVSGHMTHWKHGMKRHHQLEVKTERNNSCDTPSPGISPNAIGGDSKVGKRRKSDDGTSVSSSMHESNDAPCGSSAEGAGGAGNANVSTNQWSGSGGGGGSRKKNSIRSQLAQQMLNSSTRVLKKPQYVVRPASGTGSSSSSGNGGSASATNGISNGSNQSGANSCGAGNGERGTNNGGLSGSNGLGNQHYSSSQNLALDPTVLKIIFRYLPQDTLVTCCSVCKVWSNAAVDPDLWKKMNCSEHKMSASLLTAIVRRQPEHLILDWTQIAKRQLAWLVARLPALKNLSLQNCPIQAVLALHTCLCPPLQTLDLSFVRGLNDAAIRDILSPPKDSRPGLSDSKTRLRDLKVMKLAGTDISDVAVRYITQSLPYLRHLDLSSCQRITDAGVAQIGTSTTATARLTELNLSACRLVSENALEHLAKCEGLIWLDLRHVPQVSTQSVIRFASNSKHDLCVRDIKLVERRRRNSTTANRSWHHD

SEQ ID NO: 250 - DNA, 2782 bp, Drosophila melanogaster
ctgttgcacattcgagggtgctgccctgccgccggcaagagttacaaaaataaatataccaaaaatggctgccgcctggagttggcgagccagtcactcaacgatcacaatgacaagcggatcggtggtagtgctcttcctgttgcttacgatttggcagccagccgtgcaggttgaaggacgacgccaaatggccaatagccaggagatgatcaaggatcatttgggagccaggagtcaaaacaagacaccagccatcacgaacaatgctaatcaatcgagcacatccagtgtggatttggatgatggcgccgcagatgacgatgataacaaggccgatttgccggtgaatgtcagttcgaaaccctactggcggaatcccaagaagatgagttttctgcagacgcgaccctcgggctcactgctcaccctcaattgccatgccctgggcaatcctgagcccaatatcacatggtatcgcaatggcaccgtcgactggacgcgcggctatggcagcctgaagcggaatcgatggaccctgacgatggaggatctggtgccggcggattgtggcaactacacctgcaaggtgtgcaattcattgggttgcattcgtcacgacacccaggtgattgtaagcgatcgagttaatcacaaaccgatcctaatgaccggcccattgaatctcacactggtggtcaattccacaggcagcatgcactgcaaatatctatcggacttgaccagcaagaaggcgtggatctttgtgccctgccatggcatgaccaactgctccaacaatcgatccatcattgccgaggataaggatcagttggacttcgtgaacgttaggatggagcaggagggctggtacacgtgcgtcgaaagcaacagcctgggtcaatccaatagcactgcatatctgcgagtggtgcgaagtcttcacgtcttggaagccggagtggccagtggttcacttcactcgaccagcttcgtgtacatcttcgtctttggcggactcattttcatctttatgaccaccctgtttgtcttctatgccatccgaaagatgaaacatgaaaaggtgctgaaacaacgcatcgaaaccgttcaccagtggaccaagaaagtcatcatcttcaagcccgaaggtggcggagactccagcggttccatggacaccatgattatgccggtggttaggatacagaaacagcgcaccactgtccttcagaatggcaacgagccggctccattcaatgaatatgaatttccactggactcgaactgggaactgcccagaagtcatttggtactgggtgccactttgggagaaggtgctttcggacgaatggtcatggcggaggtcaataatgccattgtcgccgtgaaaatggtgaaggaaggacacacggatgatgacattgccagcttggtgcgggaaatggaagtgatgaagatcattgggcgacatatcaatattattaacctacttggttgctgcagtcaaaatggtccgctctatgtgattgtcgagtatgcgccacacggaaatctcaaggacttcctctataggaatcgccgatccggaagggatcaggacagggacagctcgcaaccgccgccatcgccaccagctcatgtgataaccgaaaaggatctgatcaaatttgcccaccaaattgccagaggaatggactatttggcctcgcggcgatgcatccatcgagatttggcagccaggaatctgctcgtcagcgatgattatgtgctgaagattgctgattttggactggcgagggatatccaaagcacggattactatcggaagaacacgaatggcaggctacccatcaaatggatggcaccggagtcgctgcaggagaaattctatgattccaagagcgatgtctggtcatatggcatcctgctgtgggagatcatgacctatgggcagcaaccatatccaactatcatgtccgcggaggagctgtacacctatctcatgtccggtcagcggatggagaagccagcgaaatgctccatgaacatttacatcctgatgcgacaatgttggcatttcaacgccgacgatcggccaccttttacggaaatcgttgagtatatggataagctgctccagacgaaggaggactacctcgatgtggatatcgccaatctggatacgccgccctcgacgagtgacgaggaggaggatgaaacggacaacctgcagaagtggtgtaattattaaagaaatcaggatccttagatgagatcaggacaattcaagcctggtttgtgaaccaaagtcaaattgttaactagagattatgaagtgtcctttagggtgaatcctaacaaatcttcgaaagatctaaggcttgcataaaaaaatcctacaaatcgtactacactcgaatttatgtatataactctcgtttaagtctgtaaatctcttgaaacattttaccaaaattgcaccaaaggcgtaaaacccaaaacaagcagctactcgaatttacttctagtttaattgttgatttaagatattaccataaaaaatctactagtatatgcgtagttctaagttgaacttaagactcggctgtatttgctctgtatttcatattgtactgatctttgtagtattcgcagttttatactcgctaaattatactcgtagcccataaatataaaacaatgttctatcttagcgttagttgcatgccgcaagtgccttatgaaacaaataaatgttgtacacgaatcccaaaaaaaa

SEQ ID NO: 251 - protein, 729 aa, Drosophila melanogaster
MAAAWSWRASHSTITMTSGSVVVLFLLLTIWQPAVQVEGRRQMANSQEMIKDHLGARSQNKTPAITNNANQSSTSSVDLDDGAADDDDNKADLPVNVSSKPYWRNPKKMSFLQTRPSGSLLTLNCHALGNPEPNITWYRNGTVDWTRGYGSLKRNRWTLTMEDLVPADCGNYTCKVCNSLGCIRHDTQVIVSDRVNHKPILMTGPLNLTLVVNSTGSMHCKYLSDLTSKKAWIFVPCHGMTNCSNNRSIIAEDKDQLDFVNVRMEQEGWYTCVESNSLGQSNSTAYLRVVRSLHVLEAGVASGSLHSTSFVYIFVFGGLIFIFMTTLFVFYAIRKMKHEKVLKQRIETVHQWTKKVIIFKPEGGGDSSGSMDTMIMPVVRIQKQRTTVLQNGNEPAPFNEYEFPLDSNWELPRSHLVLGATLGEGAFGRMVMAEVNNAIVAVKMVKEGHTDDDIASLVREMEVMKIIGRHINIINLLGCCSQNGPLYVIVEYAPHGNLKDFLYRNRRSGRDQDRDSSQPPPSPPAHVITEKDLIKFAHQIARGMDYLASRRCIHRDLAARNLLVSDDYVLKIADFGLARDIQSTDYYRKNTNGRLPIKWMAPESLQEKFYDSKSDVWSYGILLWEIMTYGQQPYPTIMSAEELYTYLMSGQRMEKPAKCSMNIYILMRQCWHFNADDRPPFTEIVEYMDKLLQTKEDYLDVDIANLDTPPSTSDEEEDETDNLQKWCNY

SEQ ID NO: 252 - DNA, 1713 bp, Drosophila melanogaster
tgcccggaatgggagtgtggactttacgacaacaggtggagccttagtagctgggtgtcacggaggctccagcggcctgctgacgtccagctgcacgcatggccggagtttacctgtctccggttcatagcacggttctagtagcccgtattgctcgacgacgagcaccgcctcctaggctgtacctttttcatgtaactcgtcaaatccttgggcgattaagacgacgaagaaccaagacgagaccacaggcattagtacttcgtcaaactgctgcggcactcgtattggtaacggtaggattaacaccagtgccaccggaaataggtcctcatggcgaggctcttctcagacctcctcgaattcttcgaccacgggggacttacggtgacggacgcccttccagcagatctgtgtaaggaccgtgcgcttgaccaagggcccctgtatcacgtggagttgcacccgctggcccacggccggctgcacgcagaaaagcttcgacacctggatagatagctgctctcgtcaaaatggccgctttgtctcggccgcgcgttttaatgactacaaaacgaattgttatgcttgcatttcctggtgtcgttgtacttcttgtaacggaagtacccgtgagaccacgctacaccgttgcccttcccgtatcaacagtcgtgacccctcgcgtcactcaagccactccagaagttttactacgtccgtctcctccgaggcttctgcggtgacgtcttcagctacctgtaagatccgcgagtcaactcgaagatgaggaaggactaatagccacagtagtacgacgacccgaccgatgttccattcggcgaaagcctttacaagttatagtcgcaaagtgaccggcaacgccggtaggggctcccggaaggatagcaccattgacactgagatcgcgaaccgcattacgcctaccgatttgctttaagttagcaatttttcgacggatgacaactctgaaacccgacgcaattgcaatagacgagactattctggccttgaaactggttcttgctctactgccggtgctagtagtagtgaaggctgcctatgtaccgcctgcaatggccacggccaatgttactagtcccactttaggtgtatgccgtaacgttgttgcacctctaccgattctggttataatgtttggaggaactttagccccgccagacgttattgcgaatgtatgttttaccgtgggaggatcctgttgggtgacttcctcgggaacaccgccatcggtacttcttgccttacatgcggtgtcgactcttgatgcaagcgtaggtcctcatagggaagtcgagcctcgtcttctactaccgacatttcacgtaggtgttcatgttgttgttgttccttctctaaaagaagcggttcccccgagatctctgggacaatggcgtcacgtggttcatagtcaaaccatgggtctgccatggtgaatggttcgtcttgctccgtctcaaggatcggctccgcatgctctagcccgcgttcccggaagcgcacaaccgggaccgtttcccggccaggtacgttctagactagatgacgccggatcagccgtagtgactgggtggttccggggaacaagctctcagataactttacaactacgtctcgcctcacgcacaattttaccactgacctctacgggtcctttgccggaaccggtaa

SEQ ID NO: 253 - protein, 571 aa, Drosophila melanogaster
TGLTLTPEMLLSTSESSTHSASEVAGRLQVDVRTGLKWTEAKYRAKIIGHNELLLVAEDPTWKKYIEQFRNPLILLLLGSALVSVIMKQFDDAVSITIAILIVVTVAFIQEYRSEKSLEELKKLVPPECHCLREGRLDTFLARELVPGDIVHLNVGDRVPADVRLFEAVDLSIDESSFTGETEPARKITDVLLNNTNVKDHSNMKNIAFMGTLVRCGNGKGIVVSTGERSEFGEVFKMMQAEEAPKTPLQKSMDILGAQLSFYSFLIIGVIMLLGWLQGKPLSEMFNISVSLAVAAIPEGLPIVVTVTLALGVMRMAKRNSIVKKLPTVETLGCVNVICSDKTGTLTKNEMTATIIITSDGYMADVTGAGYNDQGEIHIRHCNNVEMAKTNITNLLEIGAVCNNAYIQNGTLLGQPTEGALVAVAMKNGMYATAENYVRIQEYPFSSEQKMMAVKCIHKYNNNKEEIFFAKGALETLLPQCTKYQFGTQTVPLTKQNEAEFLAEAYEIGRKGLRVLALAKGRSMQDLIYCGLVGITDPPRPLVRESIEMLMQSGVRVKMVTGDAQETALAI

SEQ ID NO: 254 - DNA, 9224 bp, Drosophila melanogaster
tcaacttttaatgagtataccagatcgaaccatatcgtttcttaccaaaactgggaaaacaatttatcattcttctgaaccacaaatgcactcctcttattcgtatctcctctttaatttaatatgagttaaaacacagctggtgattgaatttcagactcttatgcactccacgttcggttcacataactagaataatcagaaattatttcgctttggctgcaccacagtacgtagcgtatacgccgcggtgtacgcgggtgtgcgaaggagccgcgcagcgcaagtggaacgcaacacgtgttgggcgacaggtgccgagcgtttggcacacaactcgaccgaccgacgcacgaattctgaaaactgaaccagaatccccaaacgaacatgggaagcgagtgaggcaggcacgagaaccgaaacaggacgaacgacgaagccacgaggcacaaagagcgcgaggacgatgaagagcactgtggctaatgttccttcattaggtaagcatattatttcatatatatctagcaactgtatcactttaactaaagaaacctaagcatagatagtctatgaaatatctaaaatcctttaaatgttataacccgttccacagtcattcttttcattcagaaaactgtgccaaagtcatattaggacattttaaagagcgaaacgatgttctctttcgctcgaacagattgtatggcagaatagggggatattttctcaaagtttgcgcgctcaatcagctgtttccagtgcccgggggttgagtcctttaacattgcaggaggtcaggcatggcgtgaaagtcgcttatcctagctgctgcttctggcacccctcgtttttgttgtgctgccgctggagcgcctgatgctgatggtccagaaaaattcattgaccgccccaagtaaagcaggtccctcgtaattaaggttaaatagacgccaattaattattctaccctctcttcaatgcataagtagaataggaaatgttgttgacaggttaaaagatacaaatacttgcaaagataacacttcatttttaatgcttttttatagttttgggcaagaaagcttggcaagacatatagttcacttgatgaggatgatttgggatgactatatccagcaagacgcgacattaagtttgtggcactttattgtttttaacatttcaatactatttcaatatatatcgtatagtgtttgagatcttaagataaattatttattatgttaatacgctttgagcacatttcatttaaatttttaccgcccaaacgaaagctaaagcttctcaaagctgtctaataagttttacagcttatctgttaggttccatcccccactaaaagctcccagaatgagctttattttggataccttccgttcggggatctgggaatttaaagcgctgggctcagtcggtggcccaacaccgtcggcgacgacctccaaacaaccttttggggtctcgctcggcatgtcgggcttatttcgctttggaatttcacgttgacgccgcagtcagcggtagcagaggcatcggcagcggcagtagcagcgacacgggccgaaaataaaagcgttaaccgctctcctccagtgcagcagcagcagcggacccagccagtagccagcagctaatcaccacatcccagattcagtttccagttcggtgagtgggcgtcataacgcagtgaacagaacccctgagccccttaaaaaaaattcagatatttttccccccattggcggccgtgctgttgaaaagtcgcgtaatcgttcccatttctctgggtgtttcgtaatccaaatctacagagcagcagcgcatctgtaggcgtgttagtgttagtgagtgcgtattcgaatatagtttaattattctctaagtcttaccatttccgcgagctcgccacttttatgacaagttctagaacctcgaggccctcgagtgttgttgacctatgcaccgcggttgaaggagtgggggggctacgcgaactgcagcgataagaagccttatcgggtgacttttggctcactttcgtgagtactagttttctctaccggctcaaccggctctcttacttttcatccgctctttcattcgagttcatttgcttgttggcaggctttcaactgcaatttgtagtcgccgctgcggtttttctttataaatagttggcgcaaatgttaaatgtatgtactatacatcgcgatatacatatgtatactttcccatcgctctctcgcttagacttcaattagccaacgtcatcgtaaattcatcagattgttgacgtcttctcatgatagacgcaatatgcttttgtctattgcattttatacctaccatttaattgagatttcagtgaatgaaggagagcaaacattttaccgatagtttgtagagagtacatgagaaaagaggggcagaagtttaagggttgttttgaaacctacagaaaacaagttttggtactccaaaggacttcctttcaagatcaacctgattaggatttttaagaagagttttgaacatttaaaacaaccaatttatgttcctttgatcgtttatatcaagctttgggaaattttataatgaatataatggaattataggtatacattctcattgtaaagtataagctaatcgatgaaataagactagataaggtacattggcttatctagtaaacagttaccacaacaaagtttttggggtcacataataagggcatagatgaagtatgggaagggctcgaagttgcctattttcagacagtatacaattattaccacccatgctttcggctaatcagttgacggcagttcgtagtagtagtagtagtattattctcaactgttggatgttcttttgacgcactgtctgcgttcaaggaggccggacctaaaatctcgttatgatcatgcaaaacctttggaactaaaacgcaactgggggcgggttctttcgtcgttttcgatccaaaattttcactgatcgcaagctcacgaatacatatagacggacatgtggcggtttatttttataaacggtctcttgataggaacgtaaatttattttgattgttttttgttgtcatgcgttggctgctcttcgttcctcgttcttttttgtcatcgtatatatttcgcctagtgttcgaaacatttcagtcttcgattgattgccggcaagtgtaggtgggtgttgtctgctgagtgcatccgcaacatctatagataattctatagataagggtgtacatacatatctagtgtcgttctgtgaagtgtgtttagataactgtttagaaattaatagatgaaaaaatgatttgtattctagagatatattaatatattcttaaactgtgcagtatttttaatatatgcatatatcaagcttttataatatctatctgttcttaggaaccacaagctattcacgcgtgtacaaagtgttaaatatatggcgtgggaaatgtggggtcgatgtggtaaacaatatttcgcgataagttgcggaggtctaatctcttaacctgacatttatgccattcccagtccttggctcactgtcaatgtcaaacaagtataaaatgggtttttagtcatcgcagatgagttcgtatctgtatctacatattgctggacactagctatctctatcgcagttcacacgcgccacacgactttcggttttcaacaatttctattcgcatttcgtaagcaacaaatttcgctggcaacatttgttgctaaggcttgttgcttgaccttgttcaaggtcaagcgaaaattcatgcgccctgcgttggcgtcgctgcaggaacagcgcagcagcagcggcaataaaagtgaaagttaccacgtcacgcattatgcgggtgtgaagaagacagctgcattcggttagagtgagacacaagattccatgactttgattacatcagagggaattattgccgaggtttccgtgactttgctcagttacaaaaacatcatcgtcgaggttggttcggatttttctttgtgatctaagcttaaaacaattgttcggtttttgcaaatagtttttagcaaattacagacactataaaataagacactatataatatttcattccaaaaagtgcagtgatacttttccaatttgtatagtacaatccaagaggatgtttctaaaatgtgaacctttcattgatgttcgtgagaacctctaaaaaagctctattaaaaggcaacattttatatgtgaacgttgagagtgtaggacaaacctagaaaaaaaaaaatgtgagagagagagagcgaagagctgcagatatagagaaaagcacgttttccgtgcatgcgcctttaatctcattcaatcacccgctctttgccatcgaatcagctgtgaaatacactaccatgcaaagcatttattatcttcaatggaaaaatatttttaaattggaaaaaacaccagtgacattgacctgacactgaaaacaaaattatataataccgcatcattaaacaacagcatatgactcaatggctctaatcggttaactcagagttccactttaaataacttgacctttacaaatatctttttattttatggaaataataattaggtcagttcagtaaaataatccaacacttgattgatagctatctctgtagccgttgttatctttttcagtaggaacatatgtaactttgagttacttgattttggttgtcagactgtgcggatcgtatacgaaattttagtccaaatttttagttttattttttacctcgaaatatttcaaaattctctgcttacgcaatggtttccaatcatccgcgccgctgcggaattcgatagctagcttattaaaacacaatgtccgctactcaaaaacatccaacaaaataacaccacaccaaatcaaacgtaaatggatcttcgtgctgcagaactacactcgaagctcaaaaatgacgacctacttcaactaccccagcaaggagctgcaggatgagctgcgcgaaatcgcccagaaaatcgttgcccccggcaagggaatcctcgccgccgatgagtccggcccaaccatgggcaagcgtctgcaggacatcggcgtggagaacaccgaggacaaccgccgtgcctaccgtcagctgttgttcagcactgaccccaagctggccgagaacatctctggagtgatcctgttccacgagaccctctaccagaaggccgatgatggcacccccttcgccgagatcctgaagaagaagggaatcattctgggcatcaaggtcgacgagggtgttgtcccactgttcggctctgaggatgaggtcaccacccagggtctggatgacctggccgcccgttgcgcccagtacaagaaggacggttgcgacttcgccaagtggcgttgcgtcctgaagatcggcaagaacaccccatcctaccagtcgattctggagaacgccaatgtcctggcccgctacgcctccatctgccagtcgcagcgcatcgtcccaattgtggagcccgaggttctgcccgatggcgatcacgatctggacggcgcccagaaggtcaccgagaccgtcctggcggccgtctacaaggccctgagcgaccaccacgtctacctggagggtactctgctgaagcccaacatggtcaccgccggtcagtcggccaagaagaacaccccagaggagatcgctctgaccaccgtgcaggctctgcgccgcaccgttcccgccgccgttactggcgtgaccttcctgtctggaggtcagtccgaggaggaggccaccgtcaacctgagtgccatcaacaacgttcccttgatccgcccatgggccctcaccttctcgtacggtcgtgccctgcaggcctccgtcctgcgtgcctgggctggcaagaaggagaacattgctgccggccagaacgagctgcttaagcgcgccaaggttaggtccttggatagttggaatctatgcgcggattgattgcagttagcaatttaagtggtgaatgtattaagagatgtcaggatatgcttcggaagtattccttgggctaagaaatattatacatgtataatataacatacagcatattcccagccattgattccatttccgatcccaaatgaccacaatgttcttctaatcctctaatcttatcccttttatttccctaccattatttgtaacctttttttgcttttagtacgtgagacattaatttggatgatccataaccacacattaatcatgcctaggctaacggagaggcggcttgtggtaactatacagctggatcggttaaggggttcgctggaaaagatactttgcatgtggatgaccacaggtattgatctaaggattgaagaattgctgccttaagatggcgatgaacaagctttcatggggtaacttaagaatcatagccgcctttcaccaaatccgacttatcgcaaacgcctttaacatactgtcctcgtgccactcatgcttcgcttgctctaaacctaatccacaaaagcccaaaatctgattaatcccaaccaaaatcccgctctcctcgggcttccacaggccaattcccaggcctgtcagggtatttacgtgcccggctcaattccgtcgtttgccggcaatgccaacctctttgtcgcccagcacaaatactaagtcctaaatgccacgcactaatcccgagtcacaatcgagcgaagctatatcccaagccgaatccagataatccgcaagagttactgatcgaggcccagctggagtgagacgggcaacatttatattcctccaacaatggaactgcaaatatattccttttatacatttttacattttaccgaataaactgactagaccttaaagaaaatattttgggcgaacagaaataaattatatatttctaataataccttgcttatgattttgtttactttagttagctttaaacaaaaattcgatgttattttaccttttaatttaatttaaatacattttaattaaaaatgtcttgtctaactttattcatgaaggcccttggcaaacttcctactgttaattagaataataattcggaatatatgtacctgacagttaagttgaaaacaacgtgaaattcgttcggagagctgttacatatatttaatcgaatcataattttcctccaaagaacttgcaagattaaattttccaaaactttccgcagtacgcagcatgtattcgtgcgctttgatgcgtggaaagtttttagaaaattgccgcaggtggaaaaagtggcggaagttctttgagcgcagcaaaaatcagtgttaaaactttttcatactggccgaaaaacttttttgctgcggttcgccaagttacaactaagtaataattaggagtaggcatttctcacaacgaaattaatcaattttccccgctttctttaccctcctccaggccaacggtgatgctgctcagggcaagtacgttgccggcagcgctggtgccggatctggatccctgttcgtggccaaccacgcctactaaggcgtttggttggaccttggctacacgttactacaaaaaaaaaaaaatacgaagcagattgctggaaaagtttggcagatttgtttatttttaccttagtttcgagagctaagcaaagcaagcattacaaaaaataaccaaaaaaaaaagatgaacgattacactttcaaaacatgttatatatatgtagtacgtgacatttttgcaagtttattatattataacattattttagagaacaactaaatgatgagtgcagaagaaaggattgaatatgttcgatggagaaacaattcaacaattcaaacaattttatctttagtttttaagcacatgaacctattattgttgaagttattacatttctattctattattatgattatgcaagatttcaatgaaaacaaaaggatatgtcgtaaatcgctcggctaaagcacattttatggtgaacgcgacagcaatcactatcagcaacacctaaatgtatgaggcttgtaacattgacgccgcgcgccgttttttgaatttttttaatgttttataaaaagctccactatgaagatcggatgttttccattattattattattaaactttatatttatgattgataagtataagtggaaacaaatgacgagaataaacaaacacattaaaataaacgcgaaaagccaccaaaacagctttattaaccttatatacatatatttacattgttaaaagagaacttgttgttgcaaaatactaaaagaaaatatatgaatttatatattcaacatttggacttcagtgtccaatggcttctaaactgtgctggggcacaatgcttgttactagaatttttttgaaaccaactctgattctctatccaaaacgcgatgggtagtaacaacggcagcaacgacattatcacagtacatatttaaatacaaaaatattgtaccaatgactaacccacatattatcacatcatgttttaatttacacgttattcaagttgcaaattctgcatatcgttgttattcacacaattatttgaagtgcaatgtcaaaatataacagacacgagtgaaggatatacaataatacctaccggaagggttaagcttaaaatagtttattgtgaaataaaaaccaccacaaacggcaacaacaaccagctgtacatccaatatacaagaaataaaaaacaacaaataaacatcatcggcatacaagtaatggtgttaaagtgtaacatctttcaataaaaaaccttaagagcaaagaaacccgaatttggtttaattttaatgggttgttttaaaaagcgttgcatacctccaggcctgagttacagtttaaaaggtactgtgggcttaaaaccaagtcatctttatcattgaggttacatgtagcattcgaagttcttatatcactgaagtcaaccagtaataaccttgggcggttgctattaacatagccaaaggtaaagccgcagaccttgaggcaacgcagaatctgtacccaatttcgagagttttgtgttacttaaatttacaatttcgcttatttgtaatgcaaatggaagcaaaagcacagcgggcaaccgggtttcgtaatcagcaccgtgatccttttaattgg

SEQ ID NO: 255 - protein, 361 aa, Drosophila melanogaster
MTTYFNYPSKELQDELREIAQKIVAPGKGILAADESGPTMGKRLQDIGVENTEDNRRAYRQLLFSTDPKLAENISGVILFHETLYQKADDGTPFAEILKKKGIILGIKVDEGVVPLFGSEDEVTTQGLDDLAARCAQYKKDGCDFAKWRCVLKIGKNTPSYQSILENANVLARYASICQSQRIVPIVEPEVLPDGDHDLDGAQKVTETVLAAVYKALSDHHVYLEGTLLKPNMVTAGQSAKKNTPEEIALTTVQALRRTVPAAVTGVTFLSGGQSEEEATVNLSAINNVPLIRPWALTFSYGRALQASVLRAWAGKKENIAAGQNELLKRAKANGDAAQGKYVAGSAGAGSGSLFVANHAY

SEQ ID NO: 256 - DNA, 1629 bp, Drosophila melanogaster
atgtctgccagccacaaacagcgttataaaaatgccgccttggactccacagagatgcgtcgtcgtcgcgaggaggtgggcatccagttgcgaaaaaacaaacgcgaacagcagctctttaagcgacgcaatgtggttcttgagccggctacatcctcaacatcagccggagtggagagcaacaccgataacgaacagcaggctgccgacatgcacatggctgacagcagcactggcggtcaaaacgaggaagctgctggaagcggggcacagccatccgtaatcaacgaggaaatgattcaaatgctcttcagtggacgtgaaaacgaacagcttgaggcgactcaaaagttccgcaaactgctgtcccgcgatcccaatcctcccattgaggaagtcatccagaaggggatagtgccacagtttgtcacctttttgcgaaatagcgcgaatgccacgctgcagttcgaggccgcctggacgctaacgaacatcgcatcgggcacctcgcaacagaccaaggtggttatcgaggccggggcagtgcctatcttcattgatttgctctccagtccccatgatgatgttcaggaacaggccgtgtgggccctaggcaacatagccggtgactcacccatgtgtcgagaccatttgctcggctccggcattctagagcctctcctgcatgtattgagcaactcggatcgcattaccatgatacggaatgcggtgtggacactttcaaacttgtgccgcggcaaaagccctcccgcagactttgccaaaattagccatggtctaccaatactggcacggttgctgaagtacactgatgcggatgtactaagcgatacttgctgggccataggctacctgtcagatggtcccaatgataaaatccaggctgtaattgatgcgggtgtttgccgtcgcctggttgagctgctattacatcctcagcagaacgtgagcacagctgctctgagggccgtgggcaatattgtgacaggcgacgatcagcagacccaggtgatattggggtacaacgctttgacctgcattagccacctgctgcattcgacggcggaaacaatcaagaaggagtcgtgctggacaatctcaaatattgcagccggcaatcgtgagcagatccaggccttaatcaatgccaacatattcccgcagctgatggttatcatgcagacggccgaatttaagactcgcaaggaggccgcatgggccattaccaacgcaaccagcagcggtacgcacgaacagatccactacctggtgcaggttggctgtgtgccgcccatgtgcgattttctcaccgtcgtcgactcggacatcgtccaagtggcgctaaatgcacttgaaaacattttgaaggcaggtgaaaagttccagacgcgaccaaatccctatgctattaccatcgaggaatgcggaggtttggacaaaatagagtatctgcaggcgcatgaaaaccgcgacatctaccacaaatcattttacattatcgaacagtacttcggcaacgaagaggaggatagccgggtggctcccgtggcaggcacgcaacagtttgagttcgatccggacaacatgcccagcaccggatttaacttt

SEQ ID NO: 257 - protein, 543 aa, Drosophila melanogaster
MSASHKQRYKNAALDSTEMRRRREEVGIQLRKNKREQQLFKRRNVVLEPATSSTSAGVESNTDNEQQAADMHMADSSTGGQNEEAAGSGAQPSVINEEMIQMLFSGRENEQLEATQKFRKLLSRDPNPPIEEVIQKGIVPQFVTFLRNSANATLQFEAAWTLTNIASGTSQQTKVVIEAGAVPIFIDLLSSPHDDVQEQAVWALGNIAGDSPMCRDHLLGSGILEPLLHVLSNSDRITMIRNAVWTLSNLCRGKSPPADFAKISHGLPILARLLKYTDADVLSDTCWAIGYLSDGPNDKIQAVIDAGVCRRLVELLLHPQQNVSTAALRAVGNIVTGDDQQTQVILGYNALTCISHLLHSTAETIKKESCWTISNIAAGNREQIQALINANIFPQLMVIMQTAEFKTRKEAAWAITNATSSGTHEQIHYLVQVGCVPPMCDFLTVVDSDIVQVALNALENILKAGEKFQTRPNPYAITIEECGGLDKIEYLQAHENRDIYHKSFYIIEQYFGNEEEDSRVAPVAGTQQFEFDPDNMPSTGFNF

SEQ ID NO: 258 - DNA, 2206 bp, Drosophila melanogaster
  misc_feature (1)..(2206): n = a, t, c, or g
agtttggtgcggcgtcgagtggcgagcggttgtgcagaacagaataaaaaaagagttggaacccgaagaatccaagcgattagcagcatgtatcacctgaagagtctggcccgccaggcgcccgccgccaggcaggagctggccacgctggccaaggcactgcccaccgctgtgatgcagtcgagccgcggctatgccaccgagcaccagattcccgaccgcctcaaggatgtgcccaccgccaaggatccgcgcttcttcgacatggtcgagtatttcttccatcgcggctgccaaatcgccgaggaatcgctggtggacgacatgaagggcaagctgacccgcgacgagaagaagcagaaggtgaagggcatcctcatgctgatgcagccctgcgaccacatcatcgagatcgccttccccctgcgccgcgatgccggnaactacgagatgatcaccggctaccgcgcccagcacagcacccacaagacgcccaccaagggaggcatccgtttctcgttggatgtgtcacgcgatgaggtcaaagccctgtccgccctgatgaccttcaagtgcgcctgcgtggatgtgccattcggcggagccaaggccggtctgaagatcaaccctaaggagtactccgagcacgagctggagaagatcacccgtcgcttcacccttgagttggccaagaagggcttcattggacccggtgtcgatgtgcccgcccccgacatgggaaccggcgagcgcgagatgtcctggattgccgatacttatgccaagaccatcggtcacctggacatcaatgctcatgcctgtgtcaccggcaagcccatcaaccagggcggtatccacggacgcgtctcggccaccggtcgcggtgtcttccacggcctggagaacttcatcaacgaggccaattacatgagccagatcggcaccactcccggctggggcggcaagaccttcatcgtccagggcttcggtaacgtgggcctgcacaccactcgctatctgacccgcgccggagccacctgcatcggtgtcattgagcacgacggcactctgtacaacccggagggcattgaccctaagctgctggaggactacaagaacgagcacggcaccattgtgggctaccagaacgccaagccctacgagggcgagaacctcatgttcgagaagtgcgacatcttcattcccgctgccgtcgagaaggtcatcaccagcgagaatgccaaccgcattcaagctaagatcattgccgaggctgccaacggccccaccacccccgctgccgacaagatcctcatcgatcgcaacatcctggtcattcccgatctgtacatcaacgccggtggtgtcaccgtctccttcttcgagtggctgaagaacctgaaccacgtctcgtacggtcgcctgaccttcaagtatgagcgcgagtccaactaccatctgctcgcctcagtccaacagtcaattgaaagaatcattaatgacgaatccgttcaagagtccctggagcgtcgcttcggccgtgtgggcggtcgcatccccgtgaccccctccgagtcgttccagaagcgcatctccggcgcctccgagaaggatatcgtgcactccggcctggactacaccatggagcgctccgcccgcgccatcatgaagacagccatgaagtacaacctcggcctggacctcagaaccgctgcctacgtcaactccattgagaagatcttcaccacataccgcgatgccggcctggccttctaagcccgctgagtgtggtgattagcccccagactcttaactagttaattaagcaatcgaactcaagagcataactattgctattgctccatgcaccgccgtcttagatgaaaagtcacaaaaccgaaatgcaagaatcgtaatttatactatggcaattggagctggccaaaataactcttttaaaaaacaaagcaaaacaaaagcgaactttcgccgtgtttcgtattaagttgaacaagttgcgagcttattattgttgattttctgtaatttttaagttaatgagcgtcaaagtgaagcaattgcattttcaattatgtatcgcaacgtctcgtaccgtcaagtcacgtttatcgtacgatcgctccgttgccgtaacgttaaaataaatcaaatatacacaaaactaaactctaaaaaaaaaaaaaaa

SEQ ID NO: 259 - protein, 562 aa, Drosophila melanogaster
MYHLKSLARQAPAARQELATLAKALPTAVMQSSRGYATEHQIPDRLKDVPTAKDPRFFDMVEYFFHRGCQIAEESLVDDMKGKLTRDEKKQKVKGILMLMQPCDHIIEIAFPLRRDAGNYEMITGYRAQHSTHKTPTKGGIRFSLDVSRDEVKALSALMTFKCACVDVPFGGAKAGLKINPKEYSEHELEKITRRFTLELAKKGFIGPGVDVPAPDMGTGEREMSWIADTYAKTIGHLDINAHACVTGKPINQGGIHGRVSATGRGVFHGLENFINEANYMSQIGTTPGWGGKTFIVQGFGNVGLHTTRYLTRAGATCIGVIEHDGTLYNPEGIDPKLLEDYKNEHGTIVGYQNAKPYEGENLMFEKCDIFIPAAVEKVITSENANRIQAKIIAEAANGPTTPAADKILIDRNILVIPDLYINAGGVTVSFFEWLKNLNHVSYGRLTFKYERESNYHLLASVQQSIERIINDESVQESLERRFGRVGGRIPVTPSESFQKRISGASEKDIVHSGLDYTMERSARAIMKTAMKYNLGLDLRTAAYVNSIEKIFTTYRDAGLAF

SEQ ID NO: 260 - DNA, 3220 bp, Drosophila melanogaster
agaaaaataatacgcaggaagaaaatactggattccgtagccggagcgaatgcaatgagttagtccgaccagccggagaaaccaatccgagtcgcaagatgacggagcaagaggatttggccaccagcggaggtggcaatgcgaccactggctctggaaccaattgccaaaaccaactgcagcaatgtgtgcgtgggaatgtcacctgggaactgctgcccgtgcacctgcgatcggttctgcacaacaatcagcgtgactacgagaagttcgtctttaactatagtctaaagaatcagctgaggttccggggcaacctggccgccaaggtgtttcgccgggagcaacgctactacgagctattgatacagaagagcatcaatggattgggcgcatttccctaccacctggccgatatcgtcaccaagggcttgagggtgacgcccttcaactactatctggatgttttgggtcagcttttgcaaagcgacaaaagctacgatactttgcccaactttacagcagccgactgtctgcgtgtcttgggcattggccgcaacgagtacctggcccttattagcgatatgaaaactcacacaccgcgctccttgatcttcgggtcgcggcccaatccgctggacttcctgccacgctttccggtgcgcatacacatcgagccctggtggcgactggacattggctatgtcctggaagcggatattcgctatctgtcgcccgctgaaagaggcctgctcgatgacttgattgactttggagcccagccggctgggaaatgcgatcacgacgtggtgcacagcctgtaccggaagggtttgatctacttagatgtgcccattagcggggaggacaggatatccataccgccgctgcgcaactttgtgatgaatcgtgtgagcggggactactttgagaatctgctgtacaagatcttcgttagcgcggatgagcacatgaccattgccgagttggcacagatgctgcaactggaactggatagcgttaagcaggccatatcgtttatctgccgtctgggtttcgcacatcgcaaagaagatctggtcaatcagacgaatcattccagctgggagggatacaaccagcagcaaacgccagatacgccgcagatcacaccgctgaactacaatttgcataccagtagcagcttcgaattcgaccaaagtcccaaatcgccaaagacacccaaggaaagggagaaggacaaggataaggacagcagttccataggctacctctcctcggatggcaacacgagtgacttcagctttgccaacctgaatacgacaccccaggagagagtgaacaacagcgatgagcaggaactgagttccgagctggagcaagaggatatgtgtgccccaaagcaggctgctccatcggctgcaatatcagcggctgtcttgccaaaaagcggtaagagggtgggctttctcttcgactccacgctcaccgcttttctaatgatgggcaatctgtcgcccggcttgaagaatcacgctgtgaccatgtttgaggtgggcaagctgtgcgaggagagtctagacagttttctggctgaactggagcaagtttcgctgctggatgcggaaggcgaaggcgacgtgtcgcgctatttcgcccacgcagtcattctgcgttctaccatttgctcactgcgacatttgctgccgggcggtttagatctgctgcgattagagtgcctagagggtttggatcagcagacaagagatcgcgttctggagaagaagtacaagtttataatagccgcttcgccgctgacggcgtcgctcagccatacatttagcattccttacttcggccaattcctgcgcagctccgatgtggcgcccatgtggagcaagctattctacaatcatatcacaggctatggaccgcctagtttgctactctgccggggaactgttttgaagaccttgccgcgcttgttcctgggctatggcaaactgctggtgaacatcctgcactctgatgcgtatgtgctcaattccgagaatttccgcagcctgaactctcagctcaagaacggctgtgtgctgctccaaggctacggaatccgcacggccggcgcgcttcactatgaatcatttccgttccaagcggcagacacacgccaagcgaagtgggctgcccatcgggccgtacacaaactgtccagccttttggacctgcgtcagcagtgcggctacataacattcctgaacactggagtgccggatctcggttgcgaggactacgaactgcaggtgcgactgaagccggcgcagcgtcaaaaacgaacttcaattgcggcgcccagcaaacccaaccatgtgccaacgaacgaggtgacaagctttcaattgaaaagcccagatgaaaaccactttgcggccacgccggaacatggtcctgcgaatgagttcactgctccggattgcagccaagtgctggccagtgaactggccaaatgcagcagtcgtgcggatctagtgtcgcagagttcggtggagatcgaggagatttcgccgtcggtggtgcaggaggaggacgccactgaggagtggaccctgctggacgtcaattttggcgtaccactattcgatgtcgataccaatacgagaatttgcgagcaacttgtccagggactctgtagcgatgctaatttggaagcattgcctgcggcagccagccaggcacaagttctctttctggatttcgtgcagcagtgcttgtacttcgaggacgatccggccaggcagtcggtgcaggcagcacggccacttccccatcccagaatcaacctggcattcgagaatggacacgtgtgccattggaatggtcgttgagcagcgtactcctccaatgcattccccaagtattccgtttactttcccagttacttatcagtttgtgtacagttggcggaccgatttaatggcaaacagaattatatttatatatacgtatatatatccgctaccgcattcacataagctaaccaaccatcagccaagtaagtcagcatcgcagtctgaaagtttgcgttcgttttttattagttttgtaagctcccaggggagacagaaagataaagattggctttgtgccctccaaccatatacacatattaatgtatgtctgaataaatgcaattttaacacttaaaaaaaaaaaaaaaaaa

SEQ ID NO: 261 - protein, 928 aa, Drosophila melanogaster
MTEQEDLATSGGGNATTGSGTNCQNQLQQCVRGNVTWELLPVHLRSVLHNNQRDYEKFVFNYSLKNQLRFRGNLAAKVFRREQRYYELLIQKSINGLGAFPYHLADIVTKGLRVTPFNYYLDVLGQLLQSDKSYDTLPNFTAADCLRVLGIGRNEYLALISDMKTHTPRSLIFGSRPNPLDFLPRFPVRIHIEPWWRLDIGYVLEADIRYLSPAERGLLDDLIDFGAQPAGKCDHDVVHSLYRKGLIYLDVPISGEDRISIPPLRNFVMNRVSGDYFENLLYKIFVSADEHMTIAELAQMLQLELDSVKQAISFICRLGFAHRKEDLVNQTNHSSWEGYNQQQTPDTPQITPLNYNLHTSSSFEFDQSPKSPKTPKEREKDKDKDSSSIGYLSSDGNTSDFSFANLNTTPQERVNNSDEQELSSELEQEDMCAPKQAAPSAAISAAVLPKSGKRVGFLFDSTLTAFLMMGNLSPGLKNHAVTMFEVGKLCEESLDSFLAELEQVSLLDAEGEGDVSRYFAHAVILRSTICSLRHLLPGGLDLLRLECLEGLDQQTRDRVLEKKYKFIIAASPLTASLSHTFSIPYFGQFLRSSDVAPMWSKLFYNHITGYGPPSLLLCRGTVLKTLPRLFLGYGKLLVNILHSDAYVLNSENFRSLNSQLKNGCVLLQGYGIRTAGALHYESFPFQAADTRQAKWAAHRAVHKLSSLLDLRQQCGYITFLNTGVPDLGCEDYELQVRLKPAQRQKRTSIAAPSKPNHVPTNEVTSFQLKSPDENHFAATPEHGPANEFTAPDCSQVLASELAKCSSRADLVSQSSVEIEEISPSVVQEEDATEEWTLLDVNFGVPLFDVDTNTRICEQLVQGLCSDANLEALPAAASQAQVLFLDFVQQCLYFEDDPARQSVQAARPLPHPRINLAFENGHVCHWNGR

SEQ ID NO: 262 - DNA, 3453 bp, Drosophila melanogaster
ctttattgttttaaataaacgtcatatagtgactaacgaattagaattgtttttaacaattaaccaaatcgcatttcagaaaccccttcatattttgctcacagggtgcccgtggtcttcggagtgatttttttctgctgcacgactacaggtcacacttttcgtgtcagccatgttgttttctgtcaccaaaccctcgcaagcgtaggaattacaaaacagcatttcactttttgtgttgccaggaaaatataaatttttcaggccgatcatcagcaggaataatcaaaataaatatatagcaattgagccaaaacaaacccaactgtttttgtgcattggtggtccagaataagtggagttttgaatggttttcatggtgagtaaagttcattgaataaattcagtactcgtacttaaaacagcgacacctcgccccctccgcttctcctcttcgttcgtttcgcttctgcttcttcccgtggagatgcttcaacatcaacgacttcgaagcagcaacaacaacactgcacgggagcgagaagaaaaaccaagaaactgctggaaacagtgaaaatcggttaaaaccattacccaaaagtatgttgatcagtattgattggtgcttaacgactcgcagattcctctttgcgctctgtttcgtttcggtgtgcaattcatattttatgcttagggtacagtctcggttctactagcagccccgttccagattcgatttcaagatgaaaggcattatgtaaatacatttccgcgaataaattgtgtaccgcctgtcacacattcgggggtagaaatatatatattgctcttggtcgtagtaaatacctgtattagcgaacatacctgaattggctttaaaccgaaacataggtagtccgatacaaagtcttgcttagctaggatcactcaggaactgaaagatctcttattaacaagcatgctaataaaatgcagaaaataaaacaacggatttgtttagcattgccaaggcaacatatcaattgggttttatagcgcttaccattaaatagtcttaatagctgtttgatcggaaaacataccactatttcatattggtacataactttaaggctatcaaacaatttttaaaatatatttctataattataaatgatatatggataaatgcagccacaatgctggcttcgattggcaattttgatggtaatctccctctaagaactataatttcgactgtttttaagagtgtacacttagtttaagttttcaatactttagaccacgcgatcgcagcgtgttgggacgatttgagccaccgccaaaaatgctcgtgcggaagttcggggtctgctgtggattgttgttacccacgaggccaggttgcccgggaatctgaatcgggcccggagtgctgggcgccctgctgatgcctaggccgttgtttcgcagcctgggcgccacatagggacgctggctggtggagataccgcccgttcccagaggcggcaggatacctccgtttggaggattcaccaccggaggctgttgcggctgctgtggaagatttgcattgccctgaggctgcggttgcactataggcggcacaatcgagttcacggaggagtaattgggaggctgaggctgctgctgttgcaccggaggctgcaccgtgatcggcggaatctgcgtcttctttgtgagcgctggagccaagtacgggtggttgccaccaccagtgccactgctgttgctctgcggaatgtcgtaggtgcggcctgaaggcgtggtcacttggatactgttgccaggctgcatgccacagggctttgggtagtcgtagccatttggcaccgcttggacatagttgtcgaagtactggctcacctgatgcatgggcgtggagtagttgacggcgatcagcgactccttggttcgtactcccgagcgggcttgggcgtgggccgcctggaggcgcaggatgttggcctgcttaatgtgcggcaacagttcggcatcaccctttatcttctcgaccacagcctcgtcgctatcgatgttgccactgggtacgatcccgccctcgctttgctcactggctccggctttcttggtggtggtctcctccgccggcttttgcaactccttcggcaccctttcctccttctggctgggcacctcctccggtttcttttcaccctcgggcttcttgcgattgacaaactcgaataggtcatctatgtcgggcacatcgggcagtgctccgtaggagtcaaagttgtctcggaaagcacttgcccactcctcgctcttgtgcagactgggatcaatgatcagtttcggctgctgcttgtggttgtggctgctggcgatggaggatcccaaggccgcagcttcttcgggcgccgaaatgcctcccacattcttgatcaccgtgatggtcttcacgcgggtaccctccttggagtcgatgttggtggctgcgtagctcaggctgagatccctcttggccggctgcggctccacggcgggcttatccgggtacttgatgctgattatcgtggctccatgcacgcccaccagcagcagtaggcccaacgcggccattgtgtgaaagcgggcaatctgggaaatttggttttctagttataactctcttcatttgcactctttcgttttcgaatccaatttgggttagtaaggccctagtttttgtgatcatcttattcaatttaataagggattgttgtgattggggctttaatctaatactaatttaagtcccgcctatttagacctttaatcgaatgatgttggtaagttcatcaagcgattcgtaaatgttatgcaagtcaatccaaggaaataatcaagttttaaattgtgtattgcagtggtggtctgcatgttattcttttaaatgtgttatgaacagagtttggaataaatcagcagtaataaagattgaatctcttatttcaactggatggcactgcaagttaagtctatcggtcatggataagtaagaggtgaagattgtttggttcaagtgaagacccgatcagaagtcgaacagtaagttgcttttgtgaatcaaacatgttgttatgtaaaatcgatcgattagcatgtagtccaaggatatgctcaaaatcactgccaccaaatcactactcctattcatggcacacttttaagggtaataatcccatgcacatcgatcactcactttcgatcttctcatcgctttaatccttcgcacatgcgatcgatcaatcaaatgatccgatcgtttaacgatgaaatgagcaatgcgatgcgatgataattgtgacgaggatcaatgacggccgactgcggcgggcaaggagacggtgacggtgacggtaacgcggtcaattcgaatttcctactgccggccgagatggcaacaatgctttttatatagccagg

SEQ ID NO: 263 - protein, 445 aa, Drosophila melanogaster
MAALGLLLLVGVHGATIISIKYPDKPAVEPQPAKRDLSLSYAATNIDSKEGTRVKTITVIKNVGGISAPEEAAALGSSIASSHNHKQQPKLIIDPSLHKSEEWASAFRDNFDSYGALPDVPDIDDLFEFVNRKKPEGEKKPEEVPSQKEERVPKELQKPAEETTTKKAGASEQSEGGIVPSGNIDSDEAVVEKIKGDAELLPHIKQANILRLQAAHAQARSGVRTKESLIAVNYSTPMHQVSQYFDNYVQAVPNGYDYPKPCGMQPGNSIQVTTPSGRTYDIPQSNSSGTGGGNHPYLAPALTKKTQIPPITVQPPVQQQQPQPPNYSSVNSIVPPIVQPQPQGNANLPQQPQQPPVVNPPNGGILPPLGTGGISTSQRPYVAPRLRNNGLGISRAPSTPGPIQIPGQPGLVGNNNPQQTPNFRTSIFGGGSNRPNTLRSRGLKY

SEQ ID NO: 264 - DNA, 10448 bp, Drosophila melanogaster
ttttattttttgtagtgtaccgccgaattcgaaacagccataaattcaataattaaatcggctgcaggtcggccattaaaagttcaatggaaaagtacgccacacacaataacagactgaagacactgctgataaggcagaaactaatggggaatgtgggtgaactagggaatggctttcggggatcggggaatggaattggtacatacatatgtatggcatgtatgtatgtatgtatgtatgtatgtatgtaggcccatgcctaggaaggcatatgtatctcatttgactcactttcacacaaacaaacgaaaggcaacaaacaaaggcaaacaagcaaacaaccggcaaacaacagtacaaatgtaggtgagggcacagcaaacacagtaaacactgcctgcaaacgatattttggttgcccaacagcttatctccgcttattttgggttttgtgcgtgggttttcttttcacagtgctagcgtataagtaataagtaaacagagtagtctggctgtttattgatatattcgaggagttttatctcagacctatgataaaatccgaaaaactaggcatgaactacaaatcatcattatactattgaaaacaaaatgaaatgtctggaattacatggcaataaatccaaacatctgtgagtggggaactaactagttggacatggctgtgccttgcaagctcaagtgattataaagggtggtcgcactttcccatatctttcccactgtcacacacacacacatatacggacagctgttgggactgcgactgattaactaattgaaaatatgttttgcattgttttccgcttctggtcgctcgtacgctaatggaaatggaaatgaaaaacgggagacaagtaaaaagtcggtagcgttcacttactcatttacatgtggctgcgccccctaacggtaaaaacatttgtaattgccatttgtgcggagagtcaagtgtcagctgtttgctcacctcccccttctacgttcgtctctttcgcactcccattctggagcccgcaacatggcgtcatggctgcggcatcccgctcgcacacacactgagaagaaaaccatgtgtggtcgcaacaaatgcgacaattaaagtaagtgaggcttggcgaactattgtaaattacagtgtggctgaggagaattagagggagaacgaattctgggtcagcggtggaaatgagctcatgtgcctcatgtacagtggtcactggtcaagaggaatctaatttaaaacttatggttaagaaaaagaatctttctgttagtaaaagaatggatcctaaagtttccattaatatttgtattttatgatgtcaatgaatcatatgaatgataatgctgctaactttaatttacttctatttacctatttacctaagtttcagtgaaaagataacactggcactttcatacttatgataagtaaacataaacaatctcgcgttactggcgccccgatatgaagtgatatccgtcgtaataccgtaggcatttttggggcactagactgattgagcctcattgattgattggcggaaggcgctaaatttactgaatcctaaaaatagcaactttggcaacctactttcccagaaacaattaggagtttccgcttcactcagttatactggtttcccaatttcccagtttcaatcgataggtgatttaccatatgagcaaacgtacattgtatgtgagaagtgtagtatttggtcgagataaggataagaagtgcagtggaacagtgacgcagaggaagccccgcaagtccattggccacttgacttttggccaaatcgaaatgcccacgcttttggttcttttgactcggggtccagaaacagcgtgcgctaagcgtataaatttaaacgcgtacagctgttggcatttgaatttcgactgagtcacttaatttgcggttcgcagaatttcgtgttggtttgattgattaactatagttgctggcattttctctttttgtccgtgcgatgatgctctcgcatatgcaaattgggttaataactgatttccatgtttgcattcggtcttagatgacttttattttcacagctcttacggccaagtgggtttcttattgatttttctcgtttgcatggggaaaatgcactggggaggaggcgggggaaaaagtgggcggagggaccgccaaaatacgcgtttttttcttatagcggcttatttgttgtttgcggctcacacggatagtaaaagcctgtatgcatgtgtgggtaggcgagagagaggtaaggataaaagagagggcggagtgtgcgggagagagagaggtccgattcctaccccaattcacgcctgctggctccaaaacagcccacgcatacacatgcaggacgagaacacagctgcagcggcgctgatttattgatttttcctcgggatgccatgccatcacccgcttccaccaattacataaaatgttactattaattttcggagggcaatcaaacgaaatggcgaataaaattagccacaaaggaggttaaaaatagacttttctcgtccgcccttgaaaagatttttttatcaaccgtttcttttctacctgccatttgcacaacacacacacgcacacacactcgcagaggcggccaaaaaggaggcgaaaaaggagagaagatagcaaaacccacacgaaaacagcaaaactccgcgatttacaagattgtgtgtgtatacatatacttggcttgtacttacgttttagttagttcggttaaaacaagcttagttcgcaggaatcgctggggaaaatctcgttttcgtactcctcttttgattaatttattgctttattgcacgacactttcattggcatatttcttttgatttcttgcgcgttgcatttaattcaggactgaacaggattttagcttgttttttaactacgcgcttgttgttgttgttgctgctgctgctcgctgggcaaaaagaaaactggtttttccgcacaacttcgttttttcgcttgcgtgtttctcttgttttctgaataataagccgataatcgcggcaattggcattagatttagaacgcggccgaatcgattcttttcgcaggtccactgttaaatattctttcggtttcttttaaaaaatttaacgccgcgacaaaaaacgcgagcgattcctgcggtttaaaggggttttgcagtgtggccgcagccggaatgtacaaagttactagcgagcgcgataaagggaccgttcagcctagacacgtcaataccaagtgcttacaccaccgcagacttaaaccctttcttaaatgtacaataaaaaaggtggcaacaagagatggatcaatttgaatgctaaacataacggttttaataattaaattttaaaatgaatcaaaaattttactttaatgaatacaataattaacaaaagaagcctttttgaacaaccaacgcatcttataaaaactataaaccttaacttaccaataattattaccaatcataaataaaacattggatatattatatacataaatggatttagagtactttatgacatttactttattctcatttcatattaataacgaaaaaaatgtacataaaaacgttgctgccttggttttccttcactttgcccccgataattatacataatttgacgtttcctacgtttcttacgctctgcttccggttccggtcaccacgctggtccagaaacacacgtaatttgatgggaagcctggctagatatcaaaatactgttctcgaccgatttcagaccgatttcagccaatggtctggagcacctcgttttctctgtacagggtaaaattcttttatacacttcgggcccggaaatagtcctattacttggaaactggtttctggacctggtctcattcattcaactaacgaattcgctataggttagctatgtattgtgttaagtatgctttaaaaattagccttggcttataaatatatttgtgtgtagattttcctcagcttttccgccagtttattgtagaagcagcctgtagacggttcgtgagacgcaagaagtgcatttgcagttcggttttcgctagttttgatttctgttcagtttttttttttttggttcgctttacaattgaattgtcagacaaatgtacacaagataaatggaatcaaagcgaatcaaattacatatgcggtgtaaaattacaaaatacctttgcgcagattaagtcgtattggggtggtggaccactgtagtctatagataatgcttcaaaattctctatataaatcatcaaattggttaaagcagaagtgcatccattaaaataaaaaaattgtactgaacttatccatagactacacttctctagccacacacaccccactttacagggtatatcattacgttatctttaatcttccgcccaatgggtcgtgtgatgctgctcggctaggctacctaagattattgtacaagcgacagaatcagcacactggatagaccaaacgaaacgaatcgaatcggatccgaacgaaagactcgattttgttaacaataagtgggaccatcgatcccgatctctccattcctctactggtactcatcgtcgctgctcagcagcatggtcttctcgttgtagttctggctgatggtcgccacccgctggccgccgggctggaacttcctctggttgcccagcgtctttgaggccatgcagttgctgccgccgttgccgccagatcctggtccagtggccaccgcatcgtatccaccgctggtgggctgcgacgcctgcatgcctccagctgctgctcccgagctgggatcgtcgggatcgtagctggagacgcgaatgccgcgggaattcttgccacctgtgcgggtttcattggagggaatggacttaatcgttacgggtcacacagatcgagggtctaacttattaacaagaaacattagatcatgccatgcttgtcacaaccattcctcgattaagtatgttactgaagattttagttattagttaattctacgataaaaatcttaatcgaggcacggatatatgatatatatagttggaaagaggccaataaacatgcaacgaagaaaacgaggcgaggcaaacagttgtcaagcttatcgtacatttattgctaagtattttagatattttatacaattggtttaaacatttacaaacagaagtaaatagaaggacgacgagagcttatcacaaaagggtggtcaaaaggggaaatcaaaataaaagaaggaaaaacttcgtttttggtatctttgagcgaaacggaaacacgtaaataaatgctgaggggaaactagcttgaagatcgcttgaatggggaatcctgttcagcgactgccattgttgcatacagtataataaaatctttgtttacaaatacataatattgtacaatattatagttcgtttcgtacatagctaacgtctaaataagttgttttaaaaaacgcttaagtttaggtgtagagtgtaaacgtaggaaatacagaaacacagacgcagaggcaactctaaaagccctgaactcaatggactggctaagttaatttctgttcagctttcagcgttttgtggagtgagtaagtaagtaactaggcctagtacgtatcttcctctctgagcttggtttcgggggatactgtggggcattaagctagggctaaggcgctagggctataagtacacttgtttgcttcgctttcggatcgcgtcccgctcggaaatgtggaattgtgattgcaattagtgtttagtagcgagcatcgctagagttttgcttttgatattgatttagagcttttcgtaacgctgagccgaggttacttctgcaaaagataagaaaacaagaaagaaaaacaaaagtgtgaaaaacataacgataatggaatggaaatggtaatggaaattcgcatcgaaatgcattaaatgagagcgacgaacacaagagataagataagttaagcaggctcgatgaaaagaacgaacatgccacagacacagagcacaaagagaagaagttgggctaaaaagacgagaaagcgagtaaaaaccaacctgagctgtactgcgtgtactgctggtactgcggatggaagttgtgtatagcatctgtcataatatccttgggattcattgtttcctgcgaaggattgcgggagttttagatacgggaattcccagggaaatattccagcttaccttaagactgctggaaatggactgcatggtgacagaccgtccgtggccatcgctgatgcagctgcgtgcgtagacctacaaagagcatacaacatttaagttatttttactgcaagcacttcgttttagctgatttcttctagccaagtcagcattacacgaatacctttcacatatctaacaagtgtaaggaaagccgcttaataaacaccgaaataaccgaaaaaaagcactcaagtcagcactatctaatcaccaaaaatcgtaaatagctgcgtaaaatctagcccactccgacattccaaaactcacctgataggggaatgcatagccgcagcgcgatggcggcgaacagcatttcgatgcagatgaagaagttctggtatccggcggagacggtaccgggttccacggtaacagtgcctgcactgtctacaatgggcgagataacattggccttctccaggatggccagacccacgccctgccagaaggacaagaagatgacggacttaatggtacagaactttagcacgggctcgaacggagtcagcagatcacgcgtggcgaagtagaacagatagaggccatacaacgccagcgacacggagatgttgtagataatcgtgatgtaaatgtaaccgccatcagcactgcaatttagataaggagatattattagtgggaatgatatgtacctataagttctctcttttgcaaagtgttacttaatggcagatttactggtttacagttggtaatttattgcgcacgctcgttgtttttatgccaccatttcagatgcaataacgcgggtcattaaagataaaccacattacctccaatcgccatcgtggtagtggccaaatgcctgcagaaagatgataatgaaggccaccagcggcttgaccaggcagaactgcagagtggcctgcttgcagaagcgcaggaagccaatcgtgtaggtcttgcccttcagacagcaggtgccatacaggcacgatgtcttgatgggcttgccgcgaatctccgacataatattgccctcgccacccaggtactcatagcacagcgacaagaagttgtagatgacaaaggctggatggaaatggggttagcaattagtcgatgggcaaaaatcattcaaaatcaaatcagccgaaccttcgtagcagtcgcgcaccgtaaagaagtagatgtaaacgttatccgagttgaagaaaagcagactgatccaggagtatgtggcatagatgggcacaatgaacaaaatgcgcacgatccagcgctgctcctgtggattcgtgtaccagcgcaggtgctggtagatctgccaaagatatccattagtacacaactcagaccaatgacgccttaactcacctgttgacatgtgatgaagagggcggcccagacgcacaccccagctagaacctgggcggtctttgtctgcaggaagatgccatcgcccacgtggagcagcgggtccagcggcgtgctcatcggagtgttctttacctgcaccacgtagttgggcttccctgtagcctcaagcgatcccgcagttgtagccgtggcgtttccactactggcatttagagccgcctcgatgagactggcggcggttgtgctcatgctgcaatggaatccagaacgaggaagaccgattagcgtgggtgtaactgggctaggttcaggagctattgtgcggccagttgaagtgctcagcacagacagctaggcaggcaaaatgtttacgttctcgtctcgactttcacacgaacattgctccgaaaatgacattcttactcagagacacgaaaccccatttcagcactgctgtgctgcgctcttagctatattatagttacacctgatttattcaagctcctaactcataatctaaattcattagtgaattatttctttgtattttcatatgctttcgaattattcgcacttatataaaggtttaaacaacacgcttggtcagaaattgtgaatccagtcatgtgcaagatgttgaataatagtcattgaataattatgattttaaataaacatccattatgtatgtgcattaatatctgtgtgtttttattgccctggaatatggatttttaaggtttattatgaaaatgttcttatcttgataagttcatatgtgttctatgaatcttttccatgttgccccaaaatttgtgacagcactgcaacaatgtttggacggatttgggtcagcaagaagcaaagtggggaatgtggagcggcagcaggaacaaaaacaaaaacaaacaaaagagttggcggcgggcggcgggtggtgaacgggattgggttgggattttgggagcagagggacagaggcgcgcgcattagatcatcacgcaatccaatattaataatggactctggcgcagccaaggaaagttatggccacctccacacccaccttccaccttgtctcagggtcacttcaaactgctccatatcgatttcacccgcctgggaatgccaaccaatcaataggcgagtgcaaagcaagcagaatgaattacatatttgatagatcttgagtccatttgagtgaagtttttttttttaaataatctcgaatggggagctttttgagcagcgatgctattgtgcgtacaaaaataaccgaaagtgcaatggatacaaataaactgaaagttctggtggaacggaaacatatggcagttcaagaggattatgggggccaagaaatgcgataagcattcgaggaaacaggggggaaatacagaataatgttaaaatcttgcgtggaatccacttactctaatattccaaaaaggcaaaacctacaaatcgaagtgaaatagaattgaaaatatcggaaatgacgaacaggaagtaaaatgaaatgtcaaagttccttgctgaacagtgggaaaaaagggtatcgcccatggtaaattccgatattatttattcaacaccatttaaaaaaaaaactctttttttgaggagtgcctttaccaatcatttttaataacatcaagtacaagatagctcgaaacactgactcaccactaaagggttgggaaacactaaaaacttaataaacttaacaaaaaaaaggtgtaataaacacctttttttatgatttagttttaacaaatgggatattttgtgattatagagtcattttatctccagaaatggtattcaaatataaaaactctttggatgttttgaatacttatggtatattgtgagtattccagttgtgctgacaagagtttcccattaggggaataaaaatcacgttaatgataacgaatgagtcacgaactcgtgcaaaagttaataatactcgcattgttgaactcgaatttgtgagcaaaacgcaaagcgttaaatgttaaacgcttgaaatttgcttacgaatctcggcgacaccgaaagccagaagtaaatggccaaaagaagaggcagaagaagagtgagagaaggctaagcgaaacacaatcagctgcacaaagaagaagcaacaacaagttgctgctggcggagatacacagaaattggccaagcaaaagtctccaagcgaagaagagtctccaaaggtggcaagagacgagtaaaagccatattgcgatgattgtgagggaaaaggaggcgcggtaagttggtaattatggagcagggtgtgttggaggtcggaagccttgctgtggggcttcagtgggtaaattgaatttcaggcaaaaacaaaaacatatgcagcgtcaataaaccatatgcgaaacgaccttttggagagtggggaaagaagaagactcgagcttatcttcattgctcttccactcacgcacacacaaacacacacaagtacactaacaccttgcttatcaatgcaaaagtacattgacaacaacgaaaacacagaaaacgagctcaataatttcgtcatcgaatcgggtaatccacaacctgccatttcagggaaaacaacttttacacaaacacacacacatgcagaaaacctgcacgcacaaactgaacaattccttttttaattggtacgctaattaccttttttcaaatgcaactctccacgctttagagcgttttcacagttgcaaattccgtttaatttcgctgcacccgttttatatag

SEQ ID NO: 265 - protein, 506 aa, Drosophila melanogaster
MEQFEVTLRQGGSMSTTAASLIEAALNASSGNATATTAGSLEATGKPNYVVQVKNTPMSTPLDPLLHVGDGIFLQTKTAQVLAGVCVWAALFITCQQIYQHLRWYTNPQEQRWIVRILFIVPIYATYSWISLLFFNSDNVYIYFFTVRDCYEAFVIYNFLSLCYEYLGGEGNIMSEIRGKPIKTSCLYGTCCLKGKTYTIGFLRFCKQATLQFCLVKPLVAFIIIFLQAFGHYHDGDWSADGGYIYITIIYNISVSLALYGLYLFYFATRDLLTPFEPVLKFCTIKSVIFLSFWQGVGLAILEKANVISPIVDSAGTVTVEPGTVSAGYQNFFICIEMLFAAIALRLCIPLSGEFWNVGVYARSCISDGHGRSVTMQSISSSLKETMNPKDIMTDAIHNFHPQYQQYTQYSSGGKNSRGIRVSSYDPDDPSSGAAAGGMQASQPTSGGYDAVATGPGSGGNGGSNCMASKTLGNQRKFQPGGQRVATISQNYNEKTMLLSSDDEYQ

SEQ ID NO: 266 - DNA, 11190 bp, Drosophila melanogaster
gacacaaaacccccgattccgattccgattccgatacgagtttcgagtgcgagtccgagtccccgtgtcgatgtggggacgtcgattggcagcagaggcggaggcagcggtcgcgacggagacaggaagccaccgcgacggcggcgtcgtcgaccaaatcagctgtttttggcgaattagagcaattttcaatgcgcgccgcttgctgtttctgccttctttttttgcggctttttgttgcgcttcatgtcgaagatttataagcagcgacgccggcagcgaagttagcatcgcaattggtgacattgaaaatttgcaaggcatctctcgctcttcccactttgcgtacgtgaatgtgtatggtgtttgtgattttgcgaaatgggggaacagctgacagcatacattacccatacgagaggaggccaagtggggggaagtgggggttaagaatggtaacttttggtcaatgaaccatacctcccaacctcgcctcctttccggcaaaggcaactcagctgtttgcgagatgtgtacggcagagtgaggctttcgtgaaacgtgagtcgagacccttacaaatcccaataccaaccatccaaccaacccatatcatcccattccattgtaagccgccgaagggtcgggagagcatttctacctaaggtcgagaaccataatccccgaaaaggatgcagcgcattagacacgccagtgagttcgggctcaatttcggttttctaggattgctgcactcactttctacctgaccatcccaagcgatccatcaatatgtcattccgactgtcgagactttaaggacgaattcgactgtgattgaaccattgccaagtagcggggcgactcgaaatgggaatgaaattgccaggaaatcaacctgttggtcgattgatagccctgctaataagaagtagtctgagcaatacctgtatgctgttgggaacctcctttgataggaatattgacaccaacttatttgttttaaactctaatttcatgaacattaaaatcatgatcacacagattctgtagccaactttataaagttatttttatatgtgaatattaataacaatatgaaccttaaaaagtaacttttatataacatccgccagtaatttatttttatgcgaatccgtttaagatttttgtaaaataactaacttgttcaaatacactggaatcgtgtctaaagatctcaaaaatcaagcgtctttgaacattggaataaaaaggcgaaataggaatccccagctgatggtctcccgaacgcaatagctgcttctccactgggcagatagccgatgatcatcgatctgcatgcaaaaatttttgccgtacggctcttatcacgcagaccagctgataagacaagagaacgagtagagcgaacagagccaaagagccagagcattgcgtcaagtgcgctaatcgctccgaatcggaaccagggctacaggcaacgagcaacaacaattgccgttaacaattgtcagagcgacagcacactgcgcaaattgcacgtcgcgcagtgtacgaggcaacaacagctatcaaggcgtacgtacgtacattcaccaagccgcttggtaaacacaaaattacaaaaacaaaaaataccatgaaaaaaactgtgggtatatatgtatgtaagtacatacagccccaaccaacaaagactccactccacatcccatgcctacatatgtatgtatgtacatccacagctacatccaatgttgctgactcgactcaccgcatacatacagacgctccgttcgtatatatgtaaaaacatgtacaagcgaacgagccgaacgaccgacacacgaagtacagtcgcacagttaaaaataaagtatgggccgctgcaacgcagaggggtaaagggagatgacacgagagagaaggaaggcaaagagaagaagaagagagcgagcgagggcaaaacaacaaagcgaatgctggtaaataatgatgatggaaccagtgtgctgtatatgtatgtaggcatgtgttcgtatgcgtgtgtgtgtatactgcacagtaaaatttcatgtattaaaatcgcttgttcgtgtatatgcactgtacagggtaagagctgccatcgctgtgctgttgatagcgagggacgtaatatcgcaacttttgccgttccaaaagcacggagccaagcgaacgttcgttcgttcgttcgctggttcgttcgagtttaattttgtagtacgtagcaggaaaaaaaagaaacgacgaaaaaataaatgatggcggcaacaacaacgacaacaacagcgacgactcgtcgtcgactgagttggcagtgttgcgttccgattttcgtcgaaaatatttttgtttctttttgcgtttcgaaaacactcgaagtgctaaagaaagaagagtagagcagggaagaagaagacgaacaggcagaggcttacagcgaccgtttttctagtgcgtttcgcttagaatggcaaaaatctcaaaggggacgaagaattccacccaaaaaccccccactttcagttgtagtatggtaagtggtaagtacggcgcgctcgtttttgcgaaggttgctagcgtggtgggataacggatgttggatattgtattcgtcggatgtcggacaacggccgcagcgtagcgcgcgcaaattcacgtagtttgaatcggattcggatttggactcgccagcgcagcgccacaaagctaacggatcgaaccaaggttgcccgctggcattttcctacggcatgaggcaatcaaaatgcgaagatactgtcgaagtacacggaaagataaagactttatagaaaacctggaggattgtttacagcttttgggagttatatgtatgctatgttatacattaaggaatatagtagtagttttataagaaagcgcagtttattttgtagcaaaggagtttttagtcgatagtttttaggtcgatcttgatcgcaaacaaatcaacaacttttagtatataaaatttagaatctactttttatggccatagtgatctgatcgtatattccgatcaatgctaacatgtgtacataggtacttttcatattctatctcagttgatcttgaagttttggatttatcgcgaaacctaatctgtgtgtcctttatttaacgattccttggttaacactctttaagggctgccttgccgctttaacccatgtccgcccacgagcgcccatccgtgactatgacgccaactcccggactcccgcactcgtatattccggctctgcttcgatacggccgcccacacatacatacaactctcccccgatggcagttcccccttataacaccgtggactgtttataaaataaccttattttgcacatgtacacgggttttcgttgtgctggtgtgtgtgtaagctccatcagctccacggagggttgggtgattcctactcttcccgagacaccctctctgcttttccgtctctctctttctggcactttatgcctgacattattataatattatattccttataataatgggttggcagcacaggcagccgaaaaccacctacatccatataccaaccgtccaaccacccatctgccatcagccctcccatatccttcgcctcatcccaacccctctcatcgagtcgagttggcgaccctgcgcagtaaagtcgagccggcttttctctatcgtacgaccctacgctccatactccgacatcccccttataaaatcaacccaagccacccactctgaatacttctcgtgttgggtgtggtgagatataccgtgtgacgtataaaagctaaaaacgttggcaaatataatgaaattgggtgaaatgctatgccacccactgtacctcccattaacccccaagttctggcataataaagcctaccaaacaggacgagaaatgcgctgggttttggctggattgatggtggtggtggtgctgctgctctgctgtcggcgctagtggtggtggtggttttgggccatccactagtatgaaaaccacttttccaattgcacgtacaccactacgtgggctgagcaaaagagaaagggagtgcggaagagagaaagagagatggaatgtttcaaaccactccactgccttccccttttttgccgtactcaattgctgctgttgttgttgtgtgggtggtggggcggttgtcagagagagagcagtgagcgaaatgaaaatggaagcgaggacatgcggagcaggcaggacgaacaaatgtacacagtggaaaattaaattaaagtggaatttctgctatgcgtatttgaaaatttaaaatttgtattttaaaggatgcattaaaactgtgcaagtgcaattgattgacaagctgtgctttcagtaggacgatattgggtgcattatttttgccagtgtgcttgggtgggtggagaattggggtggaccatgtagtggtgagctgggagggccttgctctgtcgctgctctgcgtacgataactttaatttggcttaatggaaattttcgctggcgctctcgtagtactgttatccttaagcaaacccgtggatcctgctcctgtttcgctctccaccccagcctccgtctcagttacccaactggccatcgtccatggtctatggtccgcgtgctaagtaggtgacgcaaccgcaaatttgcggctggcgatttaataatgctaatggtgtgcgtgtggaagtgcattggtagttggacattgcacgtgtagtggcttctgttgctgttgttgttgttcgcgccctggaccgtctgagagtcacgtcatcatcacacggccgtcgtcgtcatcgtcgagccatttacgtcgtcgccagccggtaattccccgaacccatagccatagtcatagccatagccatggccatagccatatagccacatcatccccccctcaggtggtgcaaacaagtgcaagtgatgcgcattcattgataagatttcgtgccacaactcgccgctgccagctgtctttgtatgttgcccgtggatgtgtgggcatacattaagccaagccgagccaagttaagaccgcgttgccatatacgctctgtgcgagcaaatctttcaatcggtcaacagggaacctaaagaggcacagcgattgttttacagccaacttgccacgctctctgttgtggttaaaaaacagctgttaacaacggcgctacttgcatgtcatcagtgataagcaccagttctagaaacgctagtgatccaccttcaaatcccttaactagctaacttgtggtttgttgaacccaccgactacgatagctcttatctagggatctgaacttaaccctcgccccattcgaaagtcattaacaaggggctcggttttatggggctaatacagcaactgaaatattaattggtgtaggactaccgatagttattaaaagtgtgcaatgatagagcaatttacaatgggtcaaagagtaggtatcactgattataacttaattgagagctactctcgtgtacaaggtataaggcttaaattttttcataaaggttaagaaacaagtattgtaaaattcttgatacttcgtacagtcaggtatatctagcaggtccataacttagtttggatttttatcctgtttcaccagcgggacgaaacaaaagtcgtgactgggactcaaatcgctcatgcgacgcggtgccatcgcccgtcccctttcgtggcagtcttttgtttacatttttagaagactggtaacacaacaaaagaagggaacaaaaataaagaaataccaactcctccttctcttatttgattatacattcctcattgagcaatttgcgttgtcgtgttgcacttgacccaaggagccggcaacaagttaagatgcgagggcaaattaagggagccagagcatccaaggataatggtattaatggggcacactcacatatacatcctccgtggcatggttgaagccccctgaaggcatttattttatggctgccccagacaccagacacatgtgtgtgcgtatccttcgctccactcacacactcatgcaaatatagcagcggctatgtggctatatgtgcaaccaaagcgtaaccaaaaccaaaccaaccaagtcgcgattttcattcataaaatcgaagagccaaagaaaatgggcaacgaaggaagctgctgcttctgctactgctggtgctgcgcagccaacgtcgctgctaccaataactcaaaaggcgcgcgcatttcagcgcacttgtgttaatgtatctgaaagtgaaatcaccatcaccaaaggcggccgcctcctatattccatgtacacatccgtgccatgccggtccggcgccaactccaaactattatttgccaggcctgtgcttttgcctctgcctctgcagctgctgctgcctcggccgcagtcgcagtcgctgccgcggctgacggcgctgcctgctcaattaagtgaattaagtctcgtgccggaatttgcacccccccaaaaacaccaagccaaacgagcagccaaaacgacgaggcggaacgaaaacaacaacaattcagagcagcatatgaccataaagaacaattaaaaaagcagaccaagaaaaggaataaagataaggcgctcagaatcaagactgcaacgaacgggaaatgccctttggctctgggaagaaagtaaacaatcggaggtgaaggcgtttgcgagttgcatttatcaaaacggattattgtgcaatagagaaaggtgtcggacagggtgtgtttttaatgacacttcccctcgaaactgcaacttcctcatgtcaaaacataactcgacgaaagacaggacggatcaattcttacttgaagatttcacttcttatagggagatttgtaagtcatattaatggagttaggcgtatgttcatatatcaccggttataagagttagaagtttgaaaaaccgtgttatcgaactacaagatatacgttagtattatatcattttatttatctagttttaattctacagttttttaatccacctttaatgcaatacagtaaaactattttggagttctacgtactgaccggcaaattcaacatgaactaaacgcatagtacaactttttcttactgtcgaaagaactaagaaattaatgcgagctgctccgctgccgtcaacgaaagagaaaacgtaaacagagcaatgacgctgacgctgacgacgacggcgacgccaaaaagtttgttgctgttttctgcgggggagcaggcggagctgtgggcgggcggttggcgagggggcgagctgagagagcgagcatgaggagagccgaaaaagagcgtttgcatgtaattaattaaaaggccccaaaagtcagctgtctgctgctttgctgctgccgacgcttgttgctgttgcgttgcattagacaagcgcagcggctaagccggcgacagcgacgccaacggagacgttgacgcaagcagcggctatttagcatattgtgcgaatgtgtgccaatagatggcgcttcacgatgcccggcctggtcacaaagtgcgagggagaaggacggccgcagttcagacggttattactgcactggaaagcgggcaagtgttagttttgctaagatacggggaatcacacaacaactaccaaaagtaaaatatctacctaactcggctccttatatttctaatgcttatgttttgatataaagttatgccgttcttaacgcattttatgatgattgttatatatgaatatactcgtagaaattttttccctttttttaaatacaaaatatttgaaataatttataaataactagtgttaccaaataagaatcaaatcatattccgttccgaaaatttcttaacttggtgacaccccatttcttgctgtgtttcgtcagggttttggatttgggtgttaaaggggcactggccagcctgctggctgcacgtgcaacttgtgcattgtttacattgctgaatggcagcagccacctagagtgggcattgttgctgttcttgggttcgctgccatgtccctttgttgttgagaaccttcattactccttaccccatggttttgactggtattacccacccacctaagtttgcatgtcatgcccaaagcacagccaccatcatcatcatcgccacccactgagtcaaacactcgcccacgcattgccaataagctcacaaaccacatgttgaagctacgcgcatttcgcaaggagacgctgcaggtgcggcatgccacctgagagattccccaattggcggaggctcaaccacaaagtcgccttatcagttctagggcgaactgaacttgtggcaagttcaagttactgtaagtcagttcgagggattgatattacttggaatttgagccaggcactaatcttacttatacttcaacggggaattccgaatatctttgctgttttctttggtaccgatgaaacatattgcaatttaagtttagaaaacattcttttttaactcatcctgcattttagcatagtcaaaatggtctttgtaatgttgtcaaataaggaaaaatataatgttttgatatacattttaataaataattcccaattttgatattctcataatgcatctatcaactatacaaactatctgttagtaactatgatcagagaaagcaacagtttcagcttttctaaacagtaagtgttcagacgaaacggaaatttctctttaaaaaatggcaaattttccgaaaatcttatatataattgggatccaatcctggcaggacttggaagactcacctcagtgcacattttcggctgggccgttcccagtttcacaacgtttatagccaaatagatgggaaacgaaaaaaaaggtaacgcgttggagtttttgttcagggcggtacgatccctttcagtcagtcactgggcggcgtgggcggatcagagggtggccagcaggtgtcccgaaggaaagcgggacgaacaggcgtaggagcgacccaaagcggcatcacagaacttggacgacatggctggcactacttaaactgatcaatctgtgtataatgcagttcactttaattttttttaatatttttttatattctccagttgacttgattgaatatttcacatttaacggtgtgcactttttccgggaaacagtgtttcgagttgataactttgaattacgcgcgcttggcgaacggctggcgtttacgtcgttttcgaattggagctgtcgagcgggcacggagcaaatgagcgacgtggacctcgcagcgccgtgctaaaatcacaaataaaacgttcggcgctcaagaagcaggcagcaggcagccaaacggcaggcccgcacacagacgcaagtaaatgcacccctgtacgagcaccgttcgtggtgagtgcgagcgagaacgatgcaacgctgtctcccttccacgacgcgcacttatgtaaaaagcattgaaactgaacgagtttctcgatagcagcgggggtgggagagggagagagcggtgggactgactgggagagagcgagagcgcacacacaacacaatcacaatacaggggcattgccagttgtgtgtgaggccgagtggcgttgccagccaccaattttagcccagcaaggcagaaatcccaacaacgatataacgaactacggaataacgaactacgaacagcgaagcgaaacgttgtgcaaacccaaagccaaagcaaaccaaaccaggcgctttggcccgccggttcgttcggtattcggttcgattgtgggagcgggtattcaaaagatacaagcaactgtcgtggcgttgccagagtgcaaggcccgatttaaaagtcgattggggttttgacattttgagatagcgatcgagaaggttttttgaaactttatagtgctgacaagcaaggtattatagaagagttatatagattttaacttcttggagctatgtatatagtgttatttatcagaatgagagaccaactcctatatttcaaaagtttacgttaaaactattatgcttaatatttgtttatggatcaaaacccatgtcatgtcaaaaccaagtcatgtttattcttagccattgccaaaaatatttaagctacttgcttattcttattttttttaacttggtaaaaaacccatctttgatattcagtcttgaaatgaataccaaagattatattcaatagtcgatagccaatagttgacaggacggactgtgatcaaattaagataatagtacaaacaaagtagagtagtagagtaacaaccatggttctgaagagactatcattaaaataacatattcgaagcggttcttcttcatgcggtgtacatacgtaataatatatgacttcttttctaaaactaatgaaaatatttttctacccagtacttttccaaaaccgccaaagattaagacccatgacagcgtagatttcgaccatatggcaaccctatgccgtacaaatgctgactaacagtctacaccaataccaccaacgctgtatctctcgccgctgtgtgtgcgtgtatctgtgtgtcagtcttgcttgtcagttgggattttgtttcgtttcgtatcgggtcgttcgttttcgtttatataaaggtacatttccacatgggcacatgcatggcagtctatgtcagtgtgtgtgtgtgtgtgagtggtatgcggcgaaggcagcgacaaagcaaactcaggcaaagcgactgaaacgctcgctgggaaaagcaaaactgaactcgagctgccattgctgttgctgtttcggtggcgacgtcggcttcttctcttctggtctctctctccctctcctcttctcttctcctcaccacccctctttgttaaaacatttttgtttatttcagcggcgcggtcgtatctgtatctcagatgttggctgactggttcgctccgcacactggcagtcgtatctgtatctgccaggtactttttgcccgcttcgtgtgcgctctgtgctattttatgcgctattgccaagattgctgtgcgaatttcgccttgaaacattttttgtttttcgtttttttccctgcttttcgcccagcttatctcttttggcccaaaaagtcgccaaatgaaatgaaataaa

SEQ ID NO: 267 - protein, 305 aa, Drosophila melanogaster
TQNPRFRFRFRYEFRVRVRVPVSMWGRRLAAEAEAAVATETGSHRDGGVVDQISCFWRIRAIFNARRLLFLPSFFAAFCCASCRRFISSDAGSEVSIAIGDIENLQGISRSSHFAPADKTRERVERTEPKSQSIASSALIAPNRNQGYRQRATTIAVNNCQSDSTLRKLHVAQCTRQQQLSRRTLHVMPKAQPPSSSSPPTESNTRPRIANKLTNHMLKLRAFRKETLQLSSGHGANERRGPRSAVLKSQIKRSALKKQAAGSQTAGPHTDASKCTPVRAPFVVSASENDATLSPFHDAHLCKKH

SEQ ID NO: 268 - DNA, 1720 bp, Drosophila melanogaster
cccccccccgattctttgaattttcgccaacgagccgctaacgttgctgacgaataccgaccccagaacaagaacagaatcaagatgttctccagcttctttgaaactgcccggaactcgccattccgcacccccatgtcgatggcaagatgcgatgccgccgccccagtggtggaaccccagccggttgagggtcgccagatcgccgccgccgctactccggtggccaaccagcaggattcgtgcgaattcggcagcaccaagtacttcgctctgtgcggaattggtggcattctcagctgcggcaccacccacaccttcgtggtcccactggatctggtgaagtgccgtctgcaggtcgaccaggccaagtacaagaatctggtgcacggattcaaggtcaccgtggcggaggagggcgcccgcggactggctaagggctggttccccactctgctcggctactcggcacagggtctgtgcaagttcggtctgtacgagttgttcaaggtgaagtacgccgaaatcattggcgaggagaacgcctacctgtaccgcacctccttgtatctggctgcttccgcttcggccgagttcttcgccgatatcgttctggcgccgttcgaggccgccaaggtgaagatccagactattcctggatacgccaacaacttccgcgaggcagtgcccaagatgctaaaggaggagggcgtcaatgccttctacaagggtctggttcccctgtggatgcgacagatcccatacaccatgatgaagttcgcttgcttcgagcgcaccgtggagctgctctacaagtatgtggtgcccaagcctcgtgccgactgcaccaagggcgagcagctgatcgtgaccttcgccgctggctacatcgccggtgtgttctgcgccgtggtgtcgcatcccgctgatgtggtggtgtccaagctgaaccaggccaagggagctagcgccatcagcgtggccaagtcgctgggcttcagtggcatgtggaacggattgactcctcgtattatcatgatcggtaccctgaccgctctgcagtggttcatctacgatggtgtgaaggtcgccctgggcattccccgcccaccaccaccagagatgccagctagcctgaaggccaagcagcattaagtgggctagtccaattggttaccttaaggacagagttcactagttggagcgattgtggggcagacacaggagcaacatacttttactttctaacgaatttcggtttcagtatagcgaaaatgctttatacttgtttctcagcaagaatacattaatgttgcgtgtgtgccattgcacatgtacattccaaaacaacactttacgcatttctctaacacagcacttatacacacttttttataaacacatctttctaactttaaaagccaaacattctatcgtacgaaactaagctacactcaagttcaaagtattcaattccatatatattctgttatactatgtgctatatttaatcctatgtgtgtctacttgcgctggaaagtatatccgtatgttgtacctttgatggccagcccccttgttatctcctctccgctgcccccacaggccacacatgcgaatatgatattaatgctgtttcaattgtctgacccgatacccaagaaagcactctgaataaattaaatttataaaatataaaaaaaaaaaaaaaaaaaaaaaa

SEQ ID NO: 269 - protein, 356 aa, Drosophila melanogaster
MFSSFFETARNSPFRTPMSMARCDAAAPVVEPQPVEGRQIAAAATPVANQQDSCEFGSTKYFALCGIGGILSCGTTHTFVVPLDLVKCRLQVDQAKYKNLVHGFKVTVAEEGARGLAKGWFPTLLGYSAQGLCKFGLYELFKVKYAEIIGEENAYLYRTSLYLAASASAEFFADIVLAPFEAAKVKIQTIPGYANNFREAVPKMLKEEGVNAFYKGLVPLWMRQIPYTMMKFACFERTVELLYKYVVPKPRADCTKGEQLIVTFAAGYIAGVFCAVVSHPADVVVSKLNQAKGASAISVAKSLGFSGMWNGLTPRIIMIGTLTALQWFIYDGVKVALGIPRPPPPEMPASLKAKQH

SEQ ID NO: 270 - DNA, 907 bp, Drosophila melanogaster
gccctgtagtttttcaccgaaaagggttttgctccacgaacagcagctagaggaacttcaaagatgggagcccgacagtctcaatcccgcgagccccgaaccgtttcaatggaaaacccaactcctgccggcgttattgatatatccgacgatgtggtcaagcgactgaaggcgggaatatcccagcaggctcatgagcacgcagccgctgcggaggaatcgaaaccagtgcccaagccaacgacgaaggctgccgccaagccagccgcatcctcgccagctgcttctcctgctccgaaagtatcctcctatcccgctgcagtgcccatttacgtccagggaggaggacacaccattagcgcggccgatgtgcagcgccagatgaaccaggagctaatcaagaatgacgagctgtggaaggagcgcatggcgaagctggaggagaacctcaagaagaccaacaccatcctggagaaggagtacgccaatgctgtagaaaatgtgcacaagcgattcgtcagcaccgcgtcgtcgcacaaagtgcctccctgccaggacctgaaatcccagctgcttgcctgctaccgcgcgcatcccggggagaccttgaagtgcatggaggaggtggcccaattccgacagtgcatcgatctacatcgcgtccagaagctggatgcggaaccagagtcgtcgaaagcgacctccaaggccaccgttcctgccaaggcggcctaggatcctggcagatcctttttgtcctgatttgttgacttttctttgaggccccttatgggtgttgtataaacgattgagcgatcgatggggatgcactcaaaacttaagcaaaagtgtcattgcgagcgatagtaaactaacttaaatgaatcaaaaaaaaaaaaaaaaaaaa

SEQ ID NO: 271 - protein, 223 aa, Drosophila melanogaster
MGARQSQSREPRTVSMENPTPAGVIDISDDVVKRLKAGISQQAHEHAAAAEESKPVPKPTTKAAAKPAASSPAASPAPKVSSYPAAVPIYVQGGGHTISAADVQRQMNQELIKNDELWKERMAKLEENLKKTNTILEKEYANAVENVHKRFVSTASSHKVPPCQDLKSQLLACYRAHPGETLKCMEEVAQFRQCIDLHRVQKLDAEPESSKATSKATVPAKAA

SEQ ID NO: 272 - DNA, 780 bp, Drosophila melanogaster
acgctcgccaaatggctttcaaggtaagccaaggctgatgtaatttgcaccttggcaacagactatactgttttcttaccattccagctcgttgctctggtttcctgctgcctggcagccgtgtccgctggacttatccctgtggagcagcacgaccagcatccccagctgtaccaggcccaccagccccagcatgtgatctaccaaaagcagcacgagatccatcctcacggccatgaggtctatcccgatgacccacatcccaagtacaacttcgcctacgatgtgcaggatgcgctctccggagactcgaagagccaggtggagtctagggatggggatgtggtgcagggagagtactctctggatgatgctgatggcttccgtcgtactgtaaaatacaccgccgattccgtcaatggatttaatgccgttgtgcaccgcgagcccctggcccatgtgcaccacaaggtggtggctgcagctcctgttcagtaccaccacgctcctgccgccgccgctgccgtcatcaagagctacgcctccccttcccaggcttatgtcgctcccacctacgcagcccctgcctacaccgcccccgcctacgccacccaccaggctgagcagccgcaggagcgggagcaccagcagcaccactatgccagctacgagtcccctgcccacgcccaggccgcccacgaaggacatgagtactaccaccaccagtaaggagtttccagccacagatcacatgacaagcgaaagtattattgtgcatcc

SEQ ID NO: 273 - protein, 217 aa, Drosophila melanogaster
MAFKLVALVSCCLAAVSAGLIPVEQHDQHPQLYQAHQPQHVIYQKQHEIHPHGHEVYPDDPHPKYNFAYDVQDALSGDSKSQVESRDGDVVQGEYSLDDADGFRRTVKYTADSVNGFNAVVHREPLAHVHHKVVAAAPVQYHHAPAAAAAVIKSYASPSQAYVAPTYAAPAYTAPAYATHQAEQPQEREHQQHHYASYESPAHAQAAHEGHEYYHHQ

SEQ ID NO: 274 - DNA, 8227 bp, Drosophila melanogaster; identical to SEQ ID NO: 66

SEQ ID NO: 275 - protein, 1148 aa, Drosophila melanogaster; identical to SEQ ID NO: 67

SEQ ID NO: 276 - DNA, 961 bp, Drosophila melanogaster
aggagctgcatgccaccactctggatgagtgcacgctggagggctatcgccggcacaagcaggatttcgcagccccagctccattgaccagcagggaggaggagctgaaagagctgcgaaagacagaggttcacactgagatcaatacgaatacgcggcaccaaactctgggtgggatcaattgcccgctgagcgaggcaaccgtggctgccgttcaggatttggtgcgcggcaagcacgactaccttcagttccgcatcgatctggaggaggaacagatccatgtttcgcgtgcggccaaagtggagctcgccgatctgccgaagcaagtgcccgaggatcatgcacgataccacctcttcctgtttcggcacacgcacgagggcgactactttgagtcgtacgtgttcgtctactccatgcctggatattcctgctccgtgcgcgagcgcatgatgtactcaagctgtaaggctccttttctcgacgagctcgcggcccttggcgtggaggttgttaagaaggtgagttgatatgaatgcgagtgggtgtggctgcgctaatagcactaaagattagggctataaaaagcaaaagcagggtatatattgtttgtgatttatttattgctttcaaatcgccacattcactatacttttgattcacgatctctagaaatattttgaatcataattagggcgaatgtctcacttttcacttgaaatagaaatctgtaaatcataaataatgagtaattttaaatcatactaaatctgattcatgtttctaacaacgttttacatttcagcttgaaatcgacagcggcagcgagctgaccgaagccttcttgcaggacgagctgcacccaaagaagattctacaccgaccggcttttgccaagcccaaggggccaccaaaccgaggcgccaagcgcctcacgcgtcccaccgcagaggactaa

SEQ ID NO: 277 - protein, 224 aa, Drosophila melanogaster
ELHATTLDECTLEGYRRHKQDFAAPAPLTSREEELKELRKTEVHTEINTNTRHQTLGGINCPLSEATVAAVQDLVRGKHDYLQFRIDLEEEQIHVSRAAKVELADLPKQVPEDHARYHLFLFRHTHEGDYFESYVFVYSMPGYSCSVRERMMYSSCKAPFLDELAALGVEVVKKLEIDSGSELTEAFLQDELHPKKILHRPAFAKPKGPPNRGAKRLTRPTAED

SEQ ID NO: 278 - DNA, 972 bp, Drosophila melanogaster
tacttaaaagacacctttcctgcggccaaagactagcgtccgtaggacggttgtaagcttccgcggcgtctactttatcagctattccttttgttttgtatgttccggaaagaccggtcatttggtggtctcctttgtcctgacctcgcggagttcgtttacaaatgttagctcatccttttgattcttaaggtaaatatgattttagatgactggcatgtatttgtaaatttatcgctcaaaccgtcgtataggaggctcgaattgagccaaatggtccggccgaaggatcctaaggaataacctcgataaatgccgcctcaatgtgttagcgcgcaccggatgtacttaaagtacctcttgttggtccggtgtcgtaaatttagcgtgaaactacggttccatccatagatgcataatagtaaatttatacaatattagttcaaaaattagtattaatgtctttttcgacgttctagttaagtgtcagttgaaacggtttccgccgaagtttaccccgaccgctcaccctgaaaaatggtgtaggatgaacattcaagtcgttgtgcttaagtttagacatagacacactatgtttttacacaaggaatgtcgccgtagtagtgaacatacagccacatggcaccttttaggagttagatgcttatgaaccggcgaccaaggtagtggccgagcgaaatgtttcactcagaaccagacgccccgtaccgccgtccaccttagtaacctccaaagaacccgccgcaccgaccacactgcagcgacgacgactactttcgtagtccctggagctaccttctccaagcgatgaccgtcatgtttaccgctgagctagcgctgcttttgtaagttgtccgcaagttttttgactgtctcctgcttttgggtctcgaaaagttccgggtgctgctcttttgtaggcttgtacatagcgacctgtgctagttcact

SEQ ID NO: 279 - protein, 261 aa, Drosophila melanogaster
MNFLWKGRRFLIAGILPTFEGAADEIVDKENKTYKAFLASKPPEETGLERLKQMFTIDEFGSISSELNSVYQAGFLGFLIGAIYGGVTQSRVAYMNFMENNQATAFKSHFDAKKKLQDQFTVNFAKGGFKWGWRVGLFTTSYFGIITCMSVYRGKSSIYEYLAAGSITGSLYKVSLGLRGMAAGGIIGGFLGGVAGVTSLLLMKASGTSMEEVRYWQYKWRLDRDENIQQAFKKLTEDENPELFKAHDEKTSEHVSLDTIK

SEQ ID NO: 280 - DNA, 298 bp, Drosophila melanogaster
atgtcctcgctggacgcacgcaacaactcggcgatgatgaagcgcgccgagcagctgaagcgctgggaggagtcggacacaaaccgcgccgcccccaccccccggcacgagcacggccgcaggatcaagttcagctccggctgtgtcttcctcgccgcctgcctttccggcgacaaggacgaggtcgtccagctgctcgaccagggcgccgacatcaacaccgccaacgtcgatggactcaccgccctgcaccaggtaagtctgccagtaatcatcattctttcacacttaggaatag

SEQ ID NO: 281 - protein, 86 aa, Drosophila melanogaster
MSSLDARNNSAMMKRAEQLKRWEESDTNRAAPTPRHEHGRRIKFSSGCVFLAACLSGDKDEVVQLLDQGADINTANVDGLTALHQE

SEQ ID NO: 282 - DNA, 2076 bp, Drosophila melanogaster
gaattcggccagaaaccaaagtgcctgtgcccaagaagtgcagtggaatcggatgtgtggacaggaattttaaccgttgcagcgcgcgacttgaagagaaccgatctgaaagtgatgaaagtgtggaggccacagaaataggaaccaaaaataaattcaaaatcagagtttaaaaatagccgagtgcatggcaaattatgagatatctaaagactgtcaattaaaatagcactgttgtgtctgtgatttgttggatatctgttgttttagaagtctgctgatcatcgctcggatcacgttcgtcttggaccagcccattcttaaccgcgtccacgggaaatccagtacccaatgggtcgctggggacggcagagtccggtgctggagccgccggacccacagatgcagacgacgcccccgccgcccactctgccgccaaggacgtttatgcgacagtcgagcatcacgaaaatcggcaacatgctcaacacggccatcaacatcaatggagccaagaagccagcaagtaatggagaggcgtcttggtgcttctcacagattaaaggcgccctagacgatgatgtcacggatgcagacatcatatcctgcgtggaattcaatcacgatggcgagctgctggccactggtgacaagggcggtcgcgtcgtcatctttcagcgtgatcctgcctcaaaagccgccaatccgagacgcggcgaatacaatgtctattcgacattccaatcgcacgagcccgaattcgactacctcaagtccctggagattgaggagaagataaacaagatccggtggctgcaacaaaagaatcccgtgcactttctgctctcgaccaacgacaagacagtcaaattgtggaaggtcagtgagcgtgacaagtcgttcggcggctacaacacgaaggaggagaacggactgatccgggatccacagaatgtaacggccctccgagtgccatccgtgaagcagataccactgctggtggaggcctccccacggcgcaccttcgccaatgcacacacctatcacatcaattcaataagcgttaattcggatcaggagaccttcttgtcggccgacgacctgcggatcaatctgtggcacttggaggtggtcaaccagagctacaacattgtcgacatcaagccaaccaacatggaggagctaacagaggtgatcaccgcggccgaattccatccgaccgagtgcaatgtgtttgtctactcgagctctaagggcacaatacgattatgtgatatgcgttcggcggcgctatgcgaccggcacagcaaacagttcgaggagcccgagaatccaacgaatcgcagctttttcagcgaaataatcagctccatcagcgatgtgaagctaagcaactcgggtcgctacatgatctccagggattacttgagcatcaaagtgtgggatctgcatatggaaacaaagcccattgagacctatccggttcatgaatacctgcgcgccaagctgtgctcgctgtacgagaatgactgcatcttcgacaagttcgagtgctgttggaacggcaaggacagctcaataatgaccggaagctacaacaacttcttccgcgtcttcgatcgcaactcgaaaaaggatgtgacgctagaggcgtccagggacatcatcaaaccgaaaacggtgcttaagccacggaaagtttgcactggcggcaaacgaaagaaggatgagatcagcgtggactgtctagatttcaacaagaagatcctgcacaccgcctggcaccccgaagaaaatatcatcgccgtggctgcgaccaataacctcttcatatttcaggataaattttagccaacactcctcacaagaaccacaccatacgccacaatcacacaagcaactatatctacagaaacaccaagaactacgatcacgcctcattcttatgttaaattaatcggtttgcttcaaaatagttttcaaatttcacttgcaatcaaattgtttgcctaacaccattacctcaggccacccttatccctatccccatccatgttctccttcccacccgaattc

SEQ ID NO: 283 - protein, 499 aa, Drosophila melanogaster
MGRWGRQSPVLEPPDPQMQTTPPPPTLPPRTFMRQSSITKIGNMLNTAININGAKKPASNGEASWCFSQIKGALDDDVTDADIISCVEFNHDGELLATGDKGGRVVIFQRDPASKAANPRRGEYNVYSTFQSHEPEFDYLKSLEIEEKINKIRWLQQKNPVHFLLSTNDKTVKLWKVSERDKSFGGYNTKEENGLIRDPQNVTALRVPSVKQIPLLVEASPRRTFANAHTYHINSISVNSDQETFLSADDLRINLWHLEVVNQSYNIVDIKPTNMEELTEVITAAEFHPTECNVFVYSSSKGTIRLCDMRSAALCDRHSKQFEEPENPTNRSFFSEIISSISDVKLSNSGRYMISRDYLSIKVWDLHMETKPIETYPVHEYLRAKLCSLYENDCIFDKFECCWNGKDSSIMTGSYNNFFRVFDRNSKKDVTLEASRDIIKPKTVLKPRKVCTGGKRKKDEISVDCLDFNKKILHTAWHPEENIIAVAATNNLFIFQDKF

SEQ ID NO: 284 - DNA, 11184 bp, Drosophila melanogaster
agcaaacagaatgaaagacgcaaaaagctaaaaactatattaaatgagaaaaaggaatgttagttaagcgaaattcaaaacgaattcttaagcttaaatttgtatgtatgtaagtgtactgttcaataacaccgacacaccctcacagacacacacacacacgcgcagactaacacacacccaccacccacacagacacccatattacgcatacgagccgtttgttttctcttagcgtttccttgctctctcacactcgcactcatattcacactcacacacccatgcatggtcaaatcacatgaaacgaaaccgaacaatcgaacgggaatttggtggatttctgtttttcgcctttcgttttgagttctccatcgcaatcgcaaacaattttcttcatcatctcttaccttgcgcaacaaagaaacatattaataatatagaaaagtatttgtagttgctaaatacaagaaacaaaaagaatacaaaacaaaacaacggtacatatatatacgtatatatatatatatatattgtatacatatatacttgtatattttctatgcctaccacttatgtaatttgtagagatttcgaacttttcgccccaccacccaactaaccatctctccagagattccgattccaaaactccccgacagacagtccaaaaccacattgatttttagcccccgaagtcaagtaaacccaaagattctccacaagaacaacaccatcatcggcagagttatctgtagcgtgtttgcgtgattagcgaaggaaaatagaatgatgagctgtgcagaagctacgggagaattttcgcacgagcttattcgcagctctttcgcatggtttttgtttttcgcttttggttgtttttttttttttttaataaatttaataaatgaggaaagaaggcagactaatattttgcagtcgctgaatagaaaaggcccgtgcagaaagttaattaagcataaatcagccgaggcagcaaaaacaacagccacattcttgaacgtaacaacaacagcaatacaagaaaccagcagctaaaactgacattcgtattcatttcaaataaaaatcataaaaacaaaacaacaattgggcaacacaatttattattaattgagtttggggctcgtgtttttatgggcttgtttaaatggtcacagtcaatcatagaaagattgaaaatatagaaaggaaccgaatgttttccttatcggcacgcagtttctctattagtttattagttttttttttggaagtcgaccataaataacaataaaactagtttgttttacattttgacggatttattttaagtgatcctttcaatcatgcatctttcttgatttcacgcgttcagtatgatagagaaattttacatagtttttaaatgaagttttcaataaagattttcaaacacattttcttctatcattatcatttgctaatcaagcatagcttcgaatcgagatcaatcccacattcagtttttaattattaaccaagacttagccacagaaaatgaagattcgtacctgtcaatgcatccaaaagatgcgagcttagaaggcgcactgctgctgctcagaagaaatatatgtcaaactaaattctgtggtcatcggaaaatacaagcaggcaggcacataaagcgacagcgcttctgcgtcaaatcagaagtgtccacttaagctgaatgtatagctgggccagaagcaacacgaaaagtgggtctagtggccattgttttcagtttgctgatgtgcacaatggaaaagccgtgtgcatacagatacaaatactaagatatctatatttaaaaatctggacaacagctggaagaggcgaaggtaaggaaacagcaaagggcccgaatgcggtttagttgcgaaacgttgctcgagtctcggagatggcactgcagctgcaaattgagaagctcaaaggtttggacaactacaaggcctggtcgatgacggtgcgggcgtatctggagtcggaggaactctggacggtggtggagaatggtcccgagaacaacgaggaggtgagtgatggtgtggcgccgtttatggctacagaaaacccatgtccatgccatactccttgcagtccctgctaaaggacaagcgggccaagttcttgattctctgcctgatcgagaccaagttgtgccaattcatggtcagcatccgcacggctcgggatctgtggaattacttgcgcacccagcattcgctgcgttaaagtagaaatcaatatagatcagtttcagtccattgtattacaaatatatgaattacacttcacatgcgtagcgcccttctcctaggcttccggaagttcgatgactacaggctggtcctcgggatcctcgtctagcaggccctcgaattcccatcccaattttttctccagccgcttagttagccgctcagcgctgacacttaagccgcccgcatgcagattgaccagcagttcgcgtacatctttgtagacggtgttatgcggaccaggcaccatcagctcctcgggcagatggggcagctggtgggccaaaacctcgctgtatttcatgtacgttaacttgtgcttggtgaccgccgtttgcgagtgagccagcaagcccaaaagcttgcgccagtgggccagagactccacagagtagcccactaggaaaaatgcgtaagccagctgcagttcctcaatgagtccatcggccgtttcaaagccttcgagcagtttgtcaacagcatcgatgcagtccaaggcatggcgggaaacatcagcgggcagggcatcttgtggaacacgcaggggtacggtagtgaagcgcggagctgttccttccacgggcttaaggtccggtaggagttcgctctcatctaagagaatccgagctgcagcattccggcggcttatgctgacagtagcggctccacctcgcggccgatctgcgtccgggcaggattgcagttcgatgttcgtacggatggttccttctgtcggacggcagcgatccacgcaagactccgtcacgctgccggtgagttccttccactggaccacgtaacgatagtcgtacggcgccagcacgcgctccagttgggctaggtttttgcgtattcggtctcgctccacttccggttcggcaatcctccgcgggcgcaattcctccagttcgtggtcccactctcgtacgacaatctcattcggatggaagaagtgcacgaatccaacacgaggggctgcatcgccgtagggaccacgggaggagcaccatacgtagtggactccgggtggaatcatcttgacgcctcggaaatccggaccaatggtgtaggcacaaagatcaatgccgaattccgtgccctcgggtacaccggcgatgaccagcactccgccatcagccaggaggcgtagggctagctgcggatccattttcatgctggagttgtccttgttcattgtgaaatattgttcgcttgcaattattaggaaaaagaaaacaattgcaagtgcgggcctttcagcaagttgccagatgtgacggctatttcgataagttctttcatgtgagcagtctggcaacactagacaaacaattctttcaagcggcaaattcaatttatatatacttttttttaagtaaatcttttgtttgatataattacattgtatttagactttgttgatttttgttacagtgtatattctgcatttacttaaaattcttgctgttcttcactttattgtgtaagtggaccatgactttatatctaaactatatttatacgtagtagtaattagtattgtaagctgcgtttagtgccgatatcgtcgagtatttggcgcagctcctcatcctcgaagcgaccctctagtgaaggaatcagcgccttggcctcctcgggcgcctccggacacaaattacccagtgccgccagttcgaatttgtgcagctttttctgcatcagcaagctgaatttgaaataattgaatattactactcgtacgtgctttgttcggttttgctacattaccttcgcgcagacattatggtctccttgtttttgaactttcgaaaactatccgtgtaggcgtacgtcttcatgaagacctcggagaactcttgctcctcgtcggcggattcgttttgtcgctttcggtgatcgagaagcatgtgcacctccgatatcagcagcgtctcggcattttcgaactctgaaacaaagagaaacgaaagggtttttttttcttgaattagttacttgacgacattcaggaaatttacaagtgaaacattggagaaaaaattagccctagccataggacggtggtctgctgatatggccatgttccagcagaaaatcgtagatctgacgcgttttgttcacgtcaattttgatgagacgtcgcgcatcggccagtcgtagatatccgagctttgcttgctccgtaacgagttgattcttgtagtccaaatacgactgcggaaccagacgagccacactgcacaactttcgctcgccatcatccagtttggagtaaccaggcagatctgggatcaaagaaaaattatattcagttggtgtcaggcaatgagtaaagtgtttcccacctccaatctcaatgggactggcctttcgacgcgtgttcatcacatataactttgagttaatggccaggggaccaggatcaccgctcctgttgctctcgtaatgctgcaccaattgctgccagtcgaaagcatctgtttgcttcagcctgctgtaatctcgctgagcctgctgacgttctttgctcaagcgggcatataatttggctccggaaagagttcgaacgccgtgctcccgcagatcgtatagcttgtgcagctggctatgcagctcccgataataacgcagagactccaacagcatatcgaacttaatggggtcaggacagatctgcatgaagcccaagaaacgcatgcaactcgcatcgctgccaaaggcgtgcacgtacttggaaatccagctgacggtgcgattgggcattatgagaccgtgttgcctcattatcttgtaacgacgctggcgctctctgtgagtaaatatgcatattagattttttttagtagctttctgttataagatcatacctgaggcgattgttgtatgcccgaactagtccgagttgcaattcctctgtcacttcgcgctcaaactcactctcagacgcctcgttgtcgtcatccctgcccctatgatccaccataatagatagcagactctctgctgaggtgtcgtacggagtatcgaagtctcctcttgcacagcggtaacctgcgcttagtctgaactgcatggaggcgatgtcgtcatgacgtggtggatccaagctgcgcattttgaagacatacggcattcgctcgggcacatagctgtccctcgcatgcttcagattaaggagccgctcgaatatcccgccaaagtagcaatcgtggtagtgacgacgcacttctgcgggttcgtggcgctggtccagagcctgggagaccgcctcccagttgccatagccgtgggtgcgaagtgttttcagcagtatgcgctcgtcccgtgccgtccagtgtggctcatcggcgaaaacctgtatgttgtcgcggactatgatgtaagcgtggttattgcggtgagaaaaggcctcctttccacgtgagaaacattgcaggcagagcagggtgtcgaggcactcggagcacttaatgtacggctctgtgagactgcagcgacatgtggcacaccgattggcatcctttgtagccgatggaacactgctattctggtcccgcgtcttttcctccatctcctccaagtacctgtgcaacgtgtgcggattatacaaaaccatggagttcctggtgtgttcattctgatgtgcatggatgaaccgcttaacctgtggccccagtggctcaactgcaaagaggcaattcagtgtggtaaaaatgtggaggagtgccacttttggggcactcgaagccaaaggtttcagccagtttcacttgtaagttgcatttcggttggtgtagggcgttggttacctttgggaaactgcaggtcggcggcgtcctcatccaccatatccacggggttcataaaagacatagtgagctaagaactgctcagtttgttaaagtttatattaagaaattctaatttgcacaataaaatgtcgctgtttttagtgatgagaaaggcagggctataactggcgaagaagctatcgataggtgggtcgcatcgtgcgtagatacgttggtcacactagcaagcatgttgagtttatcattccgggtgttttgattttgttcggaattcttggtttttttccaagagagttatgtccctggtgccagaagcctctacctcgagagcgcccaagtactgctacttcttcaagaccctgctggtggaggaactggagctggaaacttcctaccacaacctgcactacggtcagtgcgcattaattggacgtctggcgttcaaggcgaatcagtaccgcctagaaaacgtgcgcgttaagtgtttgccaaagtaagtttttctatattacctatccatccggtccttaccaatgatgctgcatctttcaggaagtactccttgggcgagggcaccgtatccttgcttattcttggccttacccatgacaaagtcgtcgaaaatcgcgtgagtaccggccgctactgcattgtgcgtggtgaagtggtgctacataatgtgcagcatcccaaaggtgccaaactgaccgccggcggtgtctacgacaagatcaatagtctgtccaacgatccgttggcccaaaaacagtatctcagcgcgctacttgccacctacagaccggccatcgacttatggtacatccaggtcatcgacagagccgaggacttgctgactcgcaggctggagatgagaagtctgatcgagaaatgaacacacaccacctgaccacctcgcgaaccaatccgcagttctatatattcagtcagctctttggtaacgatttcgactggaataattgcaattgggggggcattcaaaacgttacctggaaagaattctggcagcgtgaggggcatgagctgctcgagcaaaagtggcacaagcggtttcccgaatacaaagatcttatcgaggtggtttcgtcggaggagcaaggcctttggcaggaactgtgggagaagcacgccagcgattacagtgaaaagttctggtatatatttagctgtgcctttgagaactaccaacacgatttggccaaatcatttggccttgacgtcgctgaaaactcagaagatgttgaggaggacttgcagaacctaagccttacaaataagccaataaaatcgaaacagcaaagggtcacagagaaagaggaggacgaatcatacttgactgccaacgacgatcccgaggattgtgacgaggaacaacagctgcgccttctcggattgccaacatcatttgcgtcgaaggcagatataattaattatagaaaggaaagaaagacacagtacgaactatctagcagcgatagcgaggacgatcatgatctgttgaccatggagaacaacgaaaacgaggctctgcacggcgttcagagcggttctgttaaaaagaaaaaacgacggcaaaggcaaataaaaaaactcaaggccaggatgccagagtgcatgcaagaggataacaacaaaatggtcaagtactgggtcaagcgattctcgctgttctcccgcttcgatcagggcattcggctggaccgcgagagctggttctcggtgacacccgagaagattgccaaacaaacggcccgacgactggcctgcgacgtgatcgtagatgctttctgtggatgcggcggcaatgccattcagtttgcaaacacctgtggacgcgtaattgctgtggacatcgatgccgagaagttggccatggccaagcataatgccggcatttatggtgtggcccataagatcgagtttatccacgccgattttctgcagtttgcggccagcacaaagctgcgcccaaatgtggttttcctgagccctccgtggggtggtcctgactaccaaaagcaggccacctttgatatcgaaacaggtctcctgcccgtgggtgctagccaactgatgcagctgtcccgtagcctggcatctgacgtagctttctttctgccacgcaacgccaatatgaagcaggtggtcgctctaagtggagttgggcagcagtgcgaggtggagcacaactatctggacacccgaatggttgcgctcactgcttattatggtaaaggaatcataaagggttcagtgggagaagatgagtaggattcgattgagagtaattttaataacatcattgtttttatataaataaatatatttaatttcatacatatgtatagttgaatggatttaaaaaaaaaaacgggctcataatttcatggcattttttgcttattattagatataaatcatattcaaaacgagccaataacataatatgaaaataaatctatgaaaggcattttaactaatatgtaatacaaatgatttggtaagtatctttaattaaactcgaagcatataagcacacagagttcacaaattcctgtaattatggatcaaaggaaaatgttggctatggtcaacaacttttttgttcattgtttatcgccttaagtttttccctctttttgccacatagaaagataggagaaaagttgactaatgaataaagccgcctcacatgtaacgcaagagtaaaatcttttcacccatcccttcagtgcagtgattgttgccaagtgaccggcgatgccaaagagtccaagctctttagccaatttagatggcttaacaaagctcaactggccaatggtcaatggtcataaccataacgttccgcaatcccttcttgcaactggcattggacttttaattaaaacgcaaaaggaaacaaagcgtgcgtcaatttttaagaactttgtgccacaagttgtgacttggcccaaaagccatggaacacaggcagccagccgcatcctgctgaacctggcaacgtcggttcgggggcaattaacatgctcgtctcgcggcgcaggcagcagttccttcggcattccacagcagacggcagacgatgagccggaaccagaagcaacaacccttttcatggcttacagcttacttagctctttcggatggggtgcgttcgcttgaaggggcttgtggtgtggccagtgggcggtgggcggggcatgtgcggaatttatagctgccaactggcaacagagatatttaccccttcctccattatcccccaaccccgcgccccaaccagttgcggcaagtggctgctcctttccactgcaattagtttgattaacttattagtgtgcgtcggagcagctcgagcgaaatttggagcattctttccggcgctgatttgtgggctgccttgcgaacgacggattttagtgggaagttggttggaaaatggcaatattttgacaagagtaaggcgaatattctgaatattatagtttttaattgtatacaaagttaaatttaagttaaatgtaaagtttaatgttgtgggctttaatagatttacatatgatacgtaaaatttggcgtatgagttcaggccagaacttatagttgatatcagtgatatagttgtacatagtatatagtatatagttgtagtataaatatatagagttgatatagttaatgatatcagaaatgatgttaaaaaagtttttgtttagatacgttaaaaaataaatataaaccaatttgctctataagacattttactaaaagtaatgagcatccttttatgcctttcctaatacatatatatttcagaaagaattatgcaactatttgttacctttttatacccgttacacgtagagtaaaatggtatactatattcgttgaaaactatgtaacaggcagaaggaagcgtttccgactccgtaaagttgatatattctagatcaggatcattagcccagtggatatggccaaatccgtatgtctttccggctgtccatatgaacgccgagctcttggaatctataaaagcaagaaaattaagattgagtaggagaagatggccacgcccattaaaccacgctagatgcggggcttcgaaaagagtttcgtctttttggtcgatctccctcaaactgccacttgctgagtttatggtataataatataataatgacataatgacaaaaaaaaggaataataaaaaaggaatacgttgccataagtactataatacaccatttctaatgcaaattgcaaagtaagctcgttgccggtgattaaaactgacttttattgttcggattgttattaaaataccgtgcaattggccgtcacgcgtcaactttgtcattatcagctacttaaatctaagcccccttccggatccggtttatccactttggtttttaagtcagtagcgctgttatcctttattagatacatgtaattgccgctttaatgcggggttgacaatgccaacaatttcaataacctgactgggcggcctataaaacgactggcatctcgctgaaaatatatagaaatatattttattggaaagcaagcacgtgttcacagctcatctcgtcgagcgacaagtggctgcgtccttcgtttgggcaaaaaacaaattaagtcacccttttaatacgctatttaatttccagcgtaatgttgtcatccttcttgacaaatggtcacccaaaacaacgaggtccttccaccccccgaccggctggctggctaactggctgtttgatctgtaatttgcgccacttgatgatggccttagccggggaatcccggctccgactcccatccgccatccatccgagagttactaagcggcggggtggtttatttgtgccgcaagttgcgacaatgccgcaatgcgattacagcgtgcagtccctgggaactgtgcaaaatgcgattgttcttctccggctgcaggtgcagctgcttcatgggcgcatctaattaagcgggttgggggttgtaaacactcagtaattgccaactgatttatggcctaatcgggaccagct

SEQ ID NO: 285 - protein, 645 aa, Drosophila melanogaster
MSFMNPVDMVDEDAADLQFPKVEPLGPQVKRFIHAHQNEHTRNSMVLYNPHTLHRYLEEMEEKTRDQNSSVPSATKDANRCATCRCSLTEPYIKCSECLDTLLCLQCFSRGKEAFSHRNNHAYIIVRDNIQVFADEPHWTARDERILLKTLRTHGYGNWEAVSQALDQRHEPAEVRRHYHDCYFGGIFERLLNLKHARDSYVPERMPYVFKMRSLDPPRHDDIASMQFRLSAGYRCARGDFDTPYDTSAESLLSIMVDHRGRDDDNEASESEFEREVTEELQLGLVRAYNNRLRERQRRYKIMRQHGLIMPNRTVSWISKYVHAFGSDASCMRFLGFMQICPDPIKFDMLLESLRYYRELHSQLHKLYDLREHGVRTLSGAKLYARLSKERQQAQRDYSRLKQTDAFDWQQLVQHYESNRSGDPGPLAINSKLYVMNTRRKASPIEIGGGKHFTHCLTPTEYNFSLIPDLPGYSKLDDGERKLCSVARLVPQSYLDYKNQLVTEQAKLGYLRLADARRLIKIDVNKTQFENAETLLISEVHMLLDHRKRQNESADEEQEFSEVFMKTYAYTDSFRKFKNKETIMSARSLLMQKKLHKFELAALGNLCPEAPEEAKALIPSLEGRFEDEELRQILDDIGTKRSLQY

SEQ ID NO: 286 - DNA, 11124 bp, Drosophila melanogaster
agcaaacagaatgaaagacgcaaaaagctaaaaactatattaaatgagaaaaaggaatgtgttcaataacaccgacacaccctcacagacacacacacacacgcgcagactaacacacacccaccacccacacagacacccatattacgcatacgagccgtttgttttctcttagcgtttccttgctctctcacactcgcactcatattcacactcacacacccatgcatggtcaaatcacatgaaacgaaaccgaacaatcgaacgggaatttggtggatttctgtttttcgcctttcgttttgagttctccatcgcaatcgcaaacaattttcttcatcatctcttaccttgcgcaacaaagaaacatattaataatatagaaaagtatttgtagttgctaaatacaagaaacaaaaagaatacaaaacaaaacaacggtacatatatatacgtatatatatatatatatattgtatacatatatacttgtatattttctatgcctaccacttatgtaatttgtagagatttcgaacttttcgccccaccacccaactaaccatctctccagagattccgattccaaaactccccgacagacagtccaaaaccacattgatttttagcccccgaagtcaagtaaacccaaagattctccacaagaacaacaccatcatcggcagagttatctgtagcgtgtttgcgtgattagcgaaggaaaatagaatgatgagctgtgcagaagctacgggagaattttcgcacgagcttattcgcagctctttcgcatggtttttgtttttcgcttttggttgtttttttttttttttaataaatttaataaatgaggaaagaaggcagactaatattttgcagtcgctgaatagaaaaggcccgtgcagaaagttaattaagcataaatcagccgaggcagcaaaaacaacagccacattcttgaacgtaacaacaacagcaatacaagaaaccagcagctaaaactgacattcgtattcatttcaaataaaaatcataaaaacaaaacaacaattgggcaacacaatttattattaattgagtttggggctcgtgtttttatgggcttgtttaaatggtcacagtcaatcatagaaagattgaaaatatagaaaggaaccgaatgttttccttatcggcacgcagtttctctattagtttattagttttttttttggaagtcgaccataaataacaataaaactagtttgttttacattttgacggatttattttaagtgatcctttcaatcatgcatctttcttgatttcacgcgttcagtatgatagagaaattttacatagtttttaaatgaagttttcaataaagattttcaaacacattttcttctatcattatcatttgctaatcaagcatagcttcgaatcgagatcaatcccacattcagtttttaattattaaccaagacttagccacagaaaatgaagattcgtacctgtcaatgcatccaaaagatgcgagcttagaaggcgcactgctgctgctcagaagaaatatatgtcaaactaaattctgtggtcatcggaaaatacaagcaggcaggcacataaagcgacagcgcttctgcgtcaaatcagaagtgtccacttaagctgaatgtatagctgggccagaagcaacacgaaaagtgggtctagtggccattgttttcagtttgctgatgtgcacaatggaaaagccgtgtgcatacagatacaaatactaagatatctatatttaaaaatctggacaacagctggaagaggcgaaggtaaggaaacagcaaagggcccgaatgcggtttagttgcgaaacgttgctcgagtctcggagatggcactgcagctgcaaattgagaagctcaaaggtttggacaactacaaggcctggtcgatgacggtgcgggcgtatctggagtcggaggaactctggacggtggtggagaatggtcccgagaacaacgaggaggtgagtgatggtgtggcgccgtttatggctacagaaaacccatgtccatgccatactccttgcagtccctgctaaaggacaagcgggccaagttcttgattctctgcctgatcgagaccaagttgtgccaattcatggtcagcatccgcacggctcgggatctgtggaattacttgcgcacccagcattcgctgcgttaaagtagaaatcaatatagatcagtttcagtccattgtattacaaatatatgaattacacttcacatgcgtagcgcccttctcctaggcttccggaagttcgatgactacaggctggtcctcgggatcctcgtctagcaggccctcgaattcccatcccaattttttctccagccgcttagttagccgctcagcgctgacacttaagccgcccgcatgcagattgaccagcagttcgcgtacatctttgtagacggtgttatgcggaccaggcaccatcagctcctcgggcagatggggcagctggtgggccaaaacctcgctgtatttcatgtacgttaacttgtgcttggtgaccgccgtttgcgagtgagccagcaagcccaaaagcttgcgccagtgggccagagactccacagagtagcccactaggaaaaatgcgtaagccagctgcagttcctcaatgagtccatcggccgtttcaaagccttcgagcagtttgtcaacagcatcgatgcagtccaaggcatggcgggaaacatcagcgggcagggcatcttgtggaacacgcaggggtacggtagtgaagcgcggagctgttccttccacgggcttaaggtccggtaggagttcgctctcatctaagagaatccgagctgcagcattccggcggcttatgctgacagtagcggctccacctcgcggccgatctgcgtccgggcaggattgcagttcgatgttcgtacggatggttccttctgtcggacggcagcgatccacgcaagactccgtcacgctgccggtgagttccttccactggaccacgtaacgatagtcgtacggcgccagcacgcgctccagttgggctaggtttttgcgtattcggtctcgctccacttccggttcggcaatcctccgcgggcgcaattcctccagttcgtggtcccactctcgtacgacaatctcattcggatggaagaagtgcacgaatccaacacgaggggctgcatcgccgtagggaccacgggaggagcaccatacgtagtggactccgggtggaatcatcttgacgcctcggaaatccggaccaatggtgtaggcacaaagatcaatgccgaattccgtgccctcgggtacaccggcgatgaccagcactccgccatcagccaggaggcgtagggctagctgcggatccattttcatgctggagttgtccttgttcattgtgaaatattgttcgcttgcaattattaggaaaaagaaaacaattgcaagtgcgggcctttcagcaagttgccagatgtgacggctatttcgataagttctttcatgtgagcagtctggcaacactagacaaacaattctttcaagcggcaaattcaatttatatatacttttttttaagtaaatcttttgtttgatataattacattgtatttagactttgttgatttttgttacagtgtatattctgcatttacttaaaattcttgctgttcttcactttattgtgtaagtggaccatgactttatatctaaactatatttatacgtagtagtaattagtattgtaagctgcgtttagtgccgatatcgtcgagtatttggcgcagctcctcatcctcgaagcgaccctctagtgaaggaatcagcgccttggcctcctcgggcgcctccggacacaaattacccagtgccgccagttcgaatttgtgcagctttttctgcatcagcaagctgaatttgaaataattgaatattactactcgtacgtgctttgttcggttttgctacattaccttcgcgcagacattatggtctccttgtttttgaactttcgaaaactatccgtgtaggcgtacgtcttcatgaagacctcggagaactcttgctcctcgtcggcggattcgttttgtcgctttcggtgatcgagaagcatgtgcacctccgatatcagcagcgtctcggcattttcgaactctgaaacaaagagaaacgaaagggtttttttttcttgaattagttacttgacgacattcaggaaatttacaagtgaaacattggagaaaaaattagccctagccataggacggtggtctgctgatatggccatgttccagcagaaaatcgtagatctgacgcgttttgttcacgtcaattttgatgagacgtcgcgcatcggccagtcgtagatatccgagctttgcttgctccgtaacgagttgattcttgtagtccaaatacgactgcggaaccagacgagccacactgcacaactttcgctcgccatcatccagtttggagtaaccaggcagatctgggatcaaagaaaaattatattcagttggtgtcaggcaatgagtaaagtgtttcccacctccaatctcaatgggactggcctttcgacgcgtgttcatcacatataactttgagttaatggccaggggaccaggatcaccgctcctgttgctctcgtaatgctgcaccaattgctgccagtcgaaagcatctgtttgcttcagcctgctgtaatctcgctgagcctgctgacgttctttgctcaagcgggcatataatttggctccggaaagagttcgaacgccgtgctcccgcagatcgtatagcttgtgcagctggctatgcagctcccgataataacgcagagactccaacagcatatcgaacttaatggggtcaggacagatctgcatgaagcccaagaaacgcatgcaactcgcatcgctgccaaaggcgtgcacgtacttggaaatccagctgacggtgcgattgggcattatgagaccgtgttgcctcattatcttgtaacgacgctggcgctctctgtgagtaaatatgcatattagattttttttagtagctttctgttataagatcatacctgaggcgattgttgtatgcccgaactagtccgagttgcaattcctctgtcacttcgcgctcaaactcactctcagacgcctcgttgtcgtcatccctgcccctatgatccaccataatagatagcagactctctgctgaggtgtcgtacggagtatcgaagtctcctcttgcacagcggtaacctgcgcttagtctgaactgcatggaggcgatgtcgtcatgacgtggtggatccaagctgcgcattttgaagacatacggcattcgctcgggcacatagctgtccctcgcatgcttcagattaaggagccgctcgaatatcccgccaaagtagcaatcgtggtagtgacgacgcacttctgcgggttcgtggcgctggtccagagcctgggagaccgcctcccagttgccatagccgtgggtgcgaagtgttttcagcagtatgcgctcgtcccgtgccgtccagtgtggctcatcggcgaaaacctgtatgttgtcgcggactatgatgtaagcgtggttattgcggtgagaaaaggcctcctttccacgtgagaaacattgcaggcagagcagggtgtcgaggcactcggagcacttaatgtacggctctgtgagactgcagcgacatgtggcacaccgattggcatcctttgtagccgatggaacactgctattctggtcccgcgtcttttcctccatctcctccaagtacctgtgcaacgtgtgcggattatacaaaaccatggagttcctggtgtgttcattctgatgtgcatggatgaaccgcttaacctgtggccccagtggctcaactgcaaagaggcaattcagtgtggtaaaaatgtggaggagtgccacttttggggcactcgaagccaaaggtttcagccagtttcacttgtaagttgcatttcggttggtgtagggcgttggttacctttgggaaactgcaggtcggcggcgtcctcatccaccatatccacggggttcataaaagacatagtgagctaagaactgctcagtttgttaaagtttatattaagaaattctaatttgcacaataaaatgtcgctgtttttagtgatgagaaaggcagggctataactggcgaagaagctatcgataggtgggtcgcatcgtgcgtagatacgttggtcacactagcaagcatgttgagtttatcattccgggtgttttgattttgttcggaattcttggtttttttccaagagagttatgtccctggtgccagaagcctctacctcgagagcgcccaagtactgctacttcttcaagaccctgctggtggaggaactggagctggaaacttcctaccacaacctgcactacggtcagtgcgcattaattggacgtctggcgttcaaggcgaatcagtaccgcctagaaaacgtgcgcgttaagtgtttgccaaagtaagtttttctatattacctatccatccggtccttaccaatgatgctgcatctttcaggaagtactccttgggcgagggcaccgtatccttgcttattcttggccttacccatgacaaagtcgtcgaaaatcgcgtgagtaccggccgctactgcattgtgcgtggtgaagtggtgctacataatgtgcagcatcccaaaggtgccaaactgaccgccggcggtgtctacgacaagatcaatagtctgtccaacgatccgttggcccaaaaacagtatctcagcgcgctacttgccacctacagaccggccatcgacttatggtacatccaggtcatcgacagagccgaggacttgctgactcgcaggctggagatgagaagtctgatcgagaaatgaacacacaccacctgaccacctcgcgaaccaatccgcagttctatatattcagtcagctctttggtaacgatttcgactggaataattgcaattgggggggcattcaaaacgttacctggaaagaattctggcagcgtgaggggcatgagctgctcgagcaaaagtggcacaagcggtttcccgaatacaaagatcttatcgaggtggtttcgtcggaggagcaaggcctttggcaggaactgtgggagaagcacgccagcgattacagtgaaaagttctggtatatatttagctgtgcctttgagaactaccaacacgatttggccaaatcatttggccttgacgtcgctgaaaactcagaagatgttgaggaggacttgcagaacctaagccttacaaataagccaataaaatcgaaacagcaaagggtcacagagaaagaggaggacgaatcatacttgactgccaacgacgatcccgaggattgtgacgaggaacaacagctgcgccttctcggattgccaacatcatttgcgtcgaaggcagatataattaattatagaaaggaaagaaagacacagtacgaactatctagcagcgatagcgaggacgatcatgatctgttgaccatggagaacaacgaaaacgaggctctgcacggcgttcagagcggttctgttaaaaagaaaaaacgacggcaaaggcaaataaaaaaactcaaggccaggatgccagagtgcatgcaagaggataacaacaaaatggtcaagtactgggtcaagcgattctcgctgttctcccgcttcgatcagggcattcggctggaccgcgagagctggttctcggtgacacccgagaagattgccaaacaaacggcccgacgactggcctgcgacgtgatcgtagatgctttctgtggatgcggcggcaatgccattcagtttgcaaacacctgtggacgcgtaattgctgtggacatcgatgccgagaagttggccatggccaagcataatgccggcatttatggtgtggcccataagatcgagtttatccacgccgattttctgcagtttgcggccagcacaaagctgcgcccaaatgtggttttcctgagccctccgtggggtggtcctgactaccaaaagcaggccacctttgatatcgaaacaggtctcctgcccgtgggtgctagccaactgatgcagctgtcccgtagcctggcatctgacgtagctttctttctgccacgcaacgccaatatgaagcaggtggtcgctctaagtggagttgggcagcagtgcgaggtggagcacaactatctggacacccgaatggttgcgctcactgcttattatggtaaaggaatcataaagggttcagtgggagaagatgagtaggattcgattgagagtaattttaataacatcattgtttttatataaataaatatatttaatttcatacatatgtatagttgaatggatttaaaaaaaaaaacgggctcataatttcatggcattttttgcttattattagatataaatcatattcaaaacgagccaataacataatatgaaaataaatctatgaaaggcattttaactaatatgtaatacaaatgatttggtaagtatctttaattaaactcgaagcatataagcacacagagttcacaaattcctgtaattatggatcaaaggaaaatgttggctatggtcaacaacttttttgttcattgtttatcgccttaagtttttccctctttttgccacatagaaagataggagaaaagttgactaatgaataaagccgcctcacatgtaacgcaagagtaaaatcttttcacccatcccttcagtgcagtgattgttgccaagtgaccggcgatgccaaagagtccaagctctttagccaatttagatggcttaacaaagctcaactggccaatggtcaatggtcataaccataacgttccgcaatcccttcttgcaactggcattggacttttaattaaaacgcaaaaggaaacaaagcgtgcgtcaatttttaagaactttgtgccacaagttgtgacttggcccaaaagccatggaacacaggcagccagccgcatcctgctgaacctggcaacgtcggttcgggggcaattaacatgctcgtctcgcggcgcaggcagcagttccttcggcattccacagcagacggcagacgatgagccggaaccagaagcaacaacccttttcatggcttacagcttacttagctctttcggatggggtgcgttcgcttgaaggggcttgtggtgtggccagtgggcggtgggcggggcatgtgcggaatttatagctgccaactggcaacagagatatttaccccttcctccattatcccccaaccccgcgccccaaccagttgcggcaagtggctgctcctttccactgcaattagtttgattaacttattagtgtgcgtcggagcagctcgagcgaaatttggagcattctttccggcgctgatttgtgggctgccttgcgaacgacggattttagtgggaagttggttggaaaatggcaatattttgacaagagtaaggcgaatattctgaatattatagtttttaattgtatacaaagttaaatttaagttaaatgtaaagtttaatgttgtgggctttaatagatttacatatgatacgtaaaatttggcgtatgagttcaggccagaacttatagttgatatcagtgatatagttgtacatagtatatagtatatagttgtagtataaatatatagagttgatatagttaatgatatcagaaatgatgttaaaaaagtttttgtttagatacgttaaaaaataaatataaaccaatttgctctataagacattttactaaaagtaatgagcatccttttatgcctttcctaatacatatatatttcagaaagaattatgcaactatttgttacctttttatacccgttacacgtagagtaaaatggtatactatattcgttgaaaactatgtaacaggcagaaggaagcgtttccgactccgtaaagttgatatattctagatcaggatcattagcccagtggatatggccaaatccgtatgtctttccggctgtccatatgaacgccgagctcttggaatctataaaagcaagaaaattaagattgagtaggagaagatggccacgcccattaaaccacgctagatgcggggcttcgaaaagagtttcgtctttttggtcgatctccctcaaactgccacttgctgagtttatggtataataatataataatgacataatgacaaaaaaaaggaataataaaaaaggaatacgttgccataagtactataatacaccatttctaatgcaaattgcaaagtaagctcgttgccggtgattaaaactgacttttattgttcggattgttattaaaataccgtgcaattggccgtcacgcgtcaactttgtcattatcagctacttaaatctaagcccccttccggatccggtttatccactttggtttttaagtcagtagcgctgttatcctttattagatacatgtaattgccgctttaatgcggggttgacaatgccaacaatttcaataacctgactgggcggcctataaaacgactggcatctcgctgaaaatatatagaaatatattttattggaaagcaagcacgtgttcacagctcatctcgtcgagcgacaagtggctgcgtccttcgtttgggcaaaaaacaaattaagtcacccttttaatacgctatttaatttccagcgtaatgttgtcatccttcttgacaaatggtcacccaaaacaacgaggtccttccaccccccgaccggctggctggctaactggctgtttgatctgtaatttgcgccacttgatgatggccttagccggggaatcccggctccgactcccatccgccatccatccgagagttactaagcggcggggtggtttatttgtgccgcaagttgcgacaatgccgcaatgcgattacagcgtgcagtccctgggaactgtgcaaaatgcgattgttcttctccggctgcaggtgcagctgcttcatgggcgcatctaattaagcgggttgggggttgtaaacactcagtaattgccaactgatttatggcctaatcgggaccagct

SEQ ID NO: 287 - protein, 632 aa, Drosophila melanogaster
MSLVPEASTSRAPKYCYFFKTLLVEELELETSYHNLHYGQCALIGRLAFKANQYRLENVRVKCLPKKYSLGEGTVSLLILGLTHDKVVENRVSTGRYCIVRGEVVLHNVQHPKGAKLTAGGVYDKINSLSNDPLAQKQYLSALLATYRPAIDLWYIQAGDEKSDREMNTHHLTTSRTNPQFYIFSQLFGNDFDWNNCNWGGIQNVTWKEFWQREGHELLEQKWHKRFPEYKDLIEVVSSEEQGLWQELWEKHASDYSEKFWYIFSCAFENYQHDLAKSFGLDVAENSEDVEEDLQNLSLTNKPIKSKQQRVTEKEEDESYLTANDDPEDCDEEQQLRLLGLPTSFASKADIINYRKERKTQYELSSSDSEDDHDLLTMENNENEALHGVQSGSVKKKKRRQRQIKKLKARMPECMQEDNNKMVKYWVKRFSLFSRFDQGIRLDRESWFSVTPEKIAKQTARRLACDVIVDAFCGCGGNAIQFANTCGRVIAVDIDAEKLAMAKHNAGIYGVAHKIEFIHADFLQFAASTKLRPNVVFLSPPWGGPDYQKQATFDIETGLLPVGASQLMQLSRSLASDVAFFLPRNANMKQVVALSGVGQQCEVEHNYLDTRMVALTAYYGKGIIKGSVGEDE

SEQ ID NO: 288 - DNA, 920 bp, Drosophila melanogaster
atgctctccaacctggtggtgaccaagcagaaagtggtcctcgtaataggtgagtacacactgactaccccatcgtctgccaaataatgcgaccaccaatctcccgcctcatccacagatgagctaaatcgggagcgcattgcccccaagttcatcggcagtctgctgcacgagcagggacagggggcggataccatcaaggccctgcccaccggcgtcagccttaagcacgtggccaccttcgaggcactgatcgacaagtacgccaacaacaacactgggagtactacggattccaactccactggctttaacgtcatcctgccaacattggcagacctgctgtgctaccagacgcctgctttcatatttggcttcctcaaccgcctacgccgctcggacaatgtgcgtcgggttttcctttgggcctccccgcagcacctgcaggatccgcatgccgactacatcctggctggctgcgagtacctggccgagctggtcctccgactggaatcggacaaactactctcgctgatatcacgcaagccgggcggaggggtgtccaacaggcgctactcctgcgaagtcagcaaaacccagttcaaggtgacgccgctggacggaggactgcctgcaggtgcctcccccaagcagccctcgcccgaggcggagcagaccacagagccggccagcagcaccttcaaaatcgagcttgacgaggatgaagtgttggcccgcaatgcactcaccctgccatacgaacggtgagtggtaaccattctctatgcgttacatctccttattgatatgttcgtatatatgatagcacatccgagccgtctgagggaaacataatatacacgcccgatgccgacgacgatttcgacgaggaggatccggacgaggatctgtgcatctag

SEQ ID NO: 289 - protein, 262 aa, Drosophila melanogaster
MLSNLVVTKQKVVLVIDELNRERIAPKFIGSLLHEQGQGADTIKALPTGVSLKHVATFEALIDKYANNNTGSTTDSNSTGFNVILPTLADLLCYQTPAFIFGFLNRLRRSDNVRRVFLWASPQHLQDPHADYILAGCEYLAELVLRLESDKLLSLISRKPGGGVSNRRYSCEVSKTQFKVTPLDGGLPAGASPKQPSPEAEQTTEPASSTFKIELDEDEVLARNALTLPYERTSEPSEGNIIYTPDADDDFDEEDPDEDLCI

SEQ ID NO: 290 - DNA, 2716 bp, Drosophila melanogaster
tacagcttcctgcgcctgcacctcgtccgctggttcggcctctcgcctcaacaggtccacctcggtcgctaaggcctcgtcggtgtccggcggcaaggctggtggtagaggtgccgctggtgtcactagcgccactgattaccccttttcggtcgccgtcgctgtggtcgttgttgacgttgtggacgctgtcgtcttgttcacgttggacgttgttggtagcgaccgtaactcaaccggtgaggttgccgccgccgttgaagtggtggttgtccatctgacacgtaccgtaacctaaaaccgacgttcaaactaatcacggttcattttatttggttgttcggctcacaaatcaatatcattttcaatttcgttttgcgtggctttctgtctgacgtcggcaggggaaaggggcggcgccaaaagtggtagtggtagccgtagtgctaggcgctagtcgttcgtcggtgatcattggtcattggtcattggtcgacttaaagtgaaaccaaaaggtctgaaataaataaaacgaggcgacagaagcctgaacatgcgaaaaggtttaagtaggtttcagtagacgggcccaaaatgaaagccagaaaaccacgcggatacacctaacaaataaagtttaaaacgcgtgctagacgacgttgcgaaacgaccagtcgcagaaaccgtgcgggtgaattgggattattaattgtcagtatcagtgtcgattacacggttaattaaagtgagccttgggtctcgacgcagctttacctcgtgaggttgacctcgggtaactcattggcccctgcgcaccgacgacggtcaatggtcgtaaatattaacgctaacggtcgatgttcacagaggccgcgtgaatagtcggttaaatgttcggttgtgaaccgtcaaaccgagtaaacgaataataagcgggctcagctttaattttgtggtaaacgtatggtttgcggttaatcccgccgactatcgccgggaatagctcacgtagacgtggatgttcaaatgatcggaaaatttgatagaatcagttcaggttagatatgatatggtttgatacttgtgccgatgaaagtgatgggcatgcaaggcattttacttagcttgaaattaaataaattacatagtacgacgttgtagttcgtgctccttgaacatgctacgataaatttcgctaaattatagtctacaagcctgatagacctcttgtatgactattccgctgtctatttcacccgtcttgcgagaccgcaacttttaattacaacccatttgttcgcgtttacaaatgcgtacttaatcggtttaatgcggaccactcaccggccgctttccccagcacccacacagggtcacggacccttgtccggcaagggtaattgagtcccgggtcagctatactactctagaacaaatagcgtcatagcctaccgaccgccgtttccttgacaaacaaatgggttgctcacgtcgacggtagcttcgcctagtctacatgttgacaatttcacccaaaaacccttcggataaccgagggatttgaagaccagcgtacaatagtcgttcacgaacccccaataaaattagacgcccgtccaccttgtacattaacttagtacaaatgcatcgtctccgatatttggttttcataccttttatatttgctcacgaactctaggggaaggggaaagctacggggctatagagatgggaacttactcaatacgctaatctagcggttacgcacgacacgcattttaccggagataaaaatcgagtaggggtcgaaaataacctaaaaagtccgtcgccgttccggttgtacctaggtcgcgactagttgaaattccacgagatacacgagtgggtcgacacgccggactggtactagcaggaccaccggtggacctaaccggtcgtgaagccgccagaccggccgtggagtttagggccgcacctcaagttgaccgtaggcgacaagtactggtaaccgaagtaaatggacataccgttgacactcatttacgtcgccttctccacggtgcggtgagggtaactgatcgaagctttaccattaggttgagttaagttagggtgtcggtaagactagatagcaccaaaggcgtggtgcgcgttcttctgagacttcgaatgggtgcggccgtaggtgtacccacgtaagtaagactgccactaacgggacttctgccagaagctaagggtgttgaaccggttaggcgggtaagggttgtacatgagggacgtgagaaccgaccccgagaggcgccactagcagaagagcgacgtcatacaccggcctaaacaccggaaaaaccgcggccccaactccctcttgatgtcctagcggtactacggcgacgtgtagatgaagcctgagaaacctaagcaagaccgataacgatcacgggactacccgtattggctcttccggtagaagcggtacatccacatatacgtaagatctagctagtgaactgattaggtactgctgtaaagatcgttttgaggccgaatgaggtgagaaggtggccgaccacacaaccggttacactaacctcattacatgcaccagaagccccgcgaccaacagatggatcggtgactcgggaggatgttcgccttcgggtaagggctcctgtgccgagacgacttgaggtcaagacagttgctcatt

SEQ ID NO: 291 - protein, 340 aa, Drosophila melanogaster
MSKDADVEQATKPESGVVQVEPAIPEQPQAAVPTTISTATTVIAVTNGEKPAAATPATTATPATAEQVQPATTIAGIELATPTAAATSPPTGSGKANMDPALINFKVLYVLTQLCGLTMIVLVATWIGQHFGGLAGTSNPGVEFNWHPLFMTIGFIYLYGNSILIYRGFRTTRKKTLKLTHAGIHMGAFILTVIALKTVFDSHNLANPPIPNMYSLHSWLGLSAVIVFSLQYVAGFVAFLAPGLRENYRIAMMPLHIYFGLFGFVLAIASALMGITEKAIFAIKTPAYSTLPPAGVLANVIGVMYVVFGALVVYLATEPSYKRKPIPEDTALLNSSSVNE

SEQ ID NO: 292 - DNA, 4521 bp, Drosophila melanogaster
tggtattaaaggcacttattacaaaagctattttcaaacagtttcagtttaaccgcaatttgaaggcgtcccagagctgcaaagaaacgaaatcgatttttcttgccaaaagagagagttggggcaacacaacacatatcgatattcgtttttttctggcttatgcgatgactgtaaatgatcttctagacttttatggaaatcttaaatgtgtcatttgcttgtacaagaatcaaaacaagcttataaaatccacgcgctctctgcaacataatttatattgaacataaatggaataccttccaaaataaaaagtatattttcctgagccggacagtattagttcttaacagttgaacggtcacactacgtgtcaggaaacattttagcgcgttaaaagtcagcgaaaacgatttttatcctcgtggcggctgactagtccaaagttgaagagctctatcgaattaaggataacctgatcctggacagtgtgcagtcatgtcgcatcactacgtggtgacggcgcaaaagccgacggccgttgttgcctgcctaacaggtaagaacaagagagcgtgtgaaagagaggggctccctatgcggtctcccccggcgaaaacagaaaacaagcatgtttgccggtcgccggattacacaagcccatgaaacagatttgtttgcttagcaccggcttctttggtatgctcctcaggcaacttcacctcgcccacggatctcaatttgatcattgcccggaacaatcaggtggaaatcgatctggtcacgccggagggactgcgccccctaaaagagatcaacataaatggcaccattgccgtgatgcgccacttccgaccgcccgacagcaacaaggatttgctcttcatactgacgcgtcgttacaacgtcatgatcctcgaggcccgtatggtcaacgacgtcatcacggtggtgaccaaggccaatggtaatgtttccgactcggtgggcatcccctccgaaggaggagttattgcggccatcgatcccaaggctagggtcatcggaatgtgcctttaccaggggctgttcaccatcattccgatggacaaggatgctagcgagctgaaagccacaaatcttaggtaattccggtgaattctatagtagtttgacaaatacgtgtgagcatgacatcggcgccttatcatgttttaccctgttttgtatttttaatgaatcattttcattttttcattcactactagttactagtaagtaactagtaaatgttttatgattgaagctgtattaagctccaaaataatgtatcccttcacccttcagaatggatgagctaaacgtgtacgatgttgagtttctgcacggctgcttgaatcccacagttatcgtgatccacaaggacagcgatggccggcacgtaaagtcgcacgagattaatctgcgggataaggagtttatgaaaatcgcatggaagcaggacaacgtggaaacagaggccacaatgctgatcccggtgccgtcgcccatcggtggtgttatcgtcattggtcgggaatcgattgtataccatgacggaagcaactatcacgctgtggcgccgctcacttttcgccaaagcaccatcaactgttacgcccgtgtgagtagcaatggattgcgctatctgctgggtaacatggatggtcagctgtatatgctgttccttgggaccgccgaaactagcaagggagtgactgtgaaggacataaaagtggagcaactaggcgagatctctataccagagtgcattacatacctagacaatggtttcctttacattggagcacgtcatggagactcgcagttggtgcgcttgaattcggaggccatcgacgggtcatatgtcgtgcctgtagagaatttcaccaatctagctcccattctggacattgctgtggtcgatctggatcgccagggacagggccaaatcatcacatgctcgggaagctttaaggatggatctctacgcataattcgcataggcatcggcattcaggagcatgcctgcatcgatctccccggcattaagggcatgtggtctctaaaggtgggagtcgatgagagtccgtatgagaacactttggtgctggcttttgtgggacacacaaggattctcacgctttctggtgaagaggtggaagagaccgagattcccggatttgccagcgatctgcagactttcctttgctcaaatgtggattatgatcaggtgagttgccacacaaatcctactatccagaatcaatttaattaatatttaccttttacttcagttgattcaagttacttcggatagcgttcgcttggttagcagtgccactaaagcccttgtggccgaatggcgtcctactggcgatcgtaccatcggtgttgtgtcctgcaacactacccagatcttggttgcctccgcatgcgacatattctacatagttattgaagatggaagcctccgcgagcagtcccgccgaacattggcatatgaggtagcctgtttggacatcactcccttggatgagactcaaaaaaagtcggatttggtggcggtgggcctatggaccgatatatctgctgttatcctgtcgctgcctgatcttgagaccatctacaccgaaaaactaagcggaggtaagcagaaaaaacgttgaccagctatgtagaactataaatcaatgtatttatttttggcagaaataattccccgctccattctgatgaccacatttgagggaatccattatctgctttgcgctttgggcgacggttccatgtattactttatcatggaccaaaccactgggcaactgacggacaagaagaaagtcactctcggtacacaaccaaccacgctccgcaccttccgatccttatctaccactaatgtgtttgcctgctctgatcgtcccacggtgatttactcgtcgaaccacaagttggtgttctctaacgtaaatctgaaggaggtcaaccacatgtgctccttaaatgctcaggcgtatccagatagtttggcgctggcgaacaagaacgctgttattttgggcactattgatgagattcagaagctgcatattcgaacagtgcctcttggggaaggaccacgcagaattgcttaccaagagtcgtcgcagacttttgctgtgtccaccctgcgtattgatgtccatggaagaggcggagctaaaccacttcgcaatagtgcctctacacaggcccaaaacataacgtgtagctcgaatttcctacccaaaccgggtggtggtaattccacggctgcaaatgcggaagttggtcaagagatcgatgtacacaatctactggtcatcgatcaaaacacgttcgaggttctgcacgcccaccaattcgttgcacccgaaactatatcctctctaatgtccgccaaactgggcgatgatcccaacacttactatgtggtggccacatcacttgtaattccagaagaaccggagccgaaggttggaaggattatcatcttccattatcacgagaacaagcttacacaagtggccgagaccaaggtggatggaacttgctatgccctggttgagttcaatggcaaggtcctggcaggaatcggtagttttgtccgtctatacgagtggaccaatgagaaggagttgcgcatggagtgcaacattcaaaatatgattgctgctttgtttctgaaggccaagggcgattttatattggttggagatctgatgcgctccatcacgctgctgcagcacaagcagatggagggaatctttgtcgagatcgcgcgcgactgcgaacccaagtggatgcgagcggtcgagattcttgacgacgatacgttcctaggatccgagacaaatggaaatctgttcgtgtgccagaaggacaggtaagtgaaataggcttcttgaaatcaagacacaaattcacatgaaatcctttcagtgctgctaccaccgatgaggagcgtcagttgctaccggaattggcgcgttttcatttgggcgatacggtgaacgttttccgtcacggatctctggtgatgcagaacgttggtgagcgaactacgccgatcaatggatgtgttctgtacggaacatgcaacggagccattggcattgtaacccagataccgcaggacttctacgacttcctgcacggcctggaggagcggctgaagaaaataatcaagtcggtgggcaagattgagcacacgtactaccgcaatttccaaatcaacagcaaagttgaacccagcgagggattcatcgatggagatctaattgagagctttttggacttgagtcgcgacaagatgcgcgatgccgttcagggattggaggtgagctaaattgcatttgaccactaggagctgataataacagtcttacatttgctttccagttgacactgaatggcgaacgaaagagtgcggatgtggaggatgtcataaagatcgtcgaggacctcacgcgcatgcattga

SEQ ID NO: 293 - protein, 1140 aa, Drosophila melanogaster
MSHHYVVTAQKPTAVVACLTGNFTSPTDLNLIIARNNQVEIDLVTPEGLRPLKEININGTIAVMRHFRPPDSNKDLLFILTRRYNVMILEARMVNDVITVVTKANGNVSDSVGIPSEGGVIAAIDPKARVIGMCLYQGLFTIIPMDKDASELKATNLRMDELNVYDVEFLHGCLNPTVIVIHKDSDGRHVKSHEINLRDKEFMKIAWKQDNVETEATMLIPVPSPIGGVIVIGRESIVYHDGSNYHAVAPLTFRQSTINCYARVSSNGLRYLLGNMDGQLYMLFLGTAETSKGVTVKDIKVEQLGEISIPECITYLDNGFLYIGARHGDSQLVRLNSEAIDGSYVVPVENFTNLAPILDIAVVDLDRQGQGQIITCSGSFKDGSLRIIRIGIGIQEHACIDLPGIKGMWSLKVGVDESPYENTLVLAFVGHTRILTLSGEEVEETEIPGFASDLQTFLCSNVDYDQLIQVTSDSVRLVSSATKALVAEWRPTGDRTIGVVSCNTTQILVASACDIFYIVIEDGSLREQSRRTLAYEVACLDITPLDETQKKSDLVAVGLWTDISAVILSLPDLETIYTEKLSGEIIPRSILMTTFEGIHYLLCALGDGSMYYFIMDQTTGQLTDKKKVTLGTQPTTLRTFRSLSTTNVFACSDRPTVIYSSNHKLVFSNVNLKEVNHMCSLNAQAYPDSLALANKNAVILGTIDEIQKLHIRTVPLGEGPRRIAYQESSQTFAVSTLRIDVHGRGGAKPLRNSASTQAQNITCSSNFLPKPGGGNSTAANAEVGQEIDVHNLLVIDQNTFEVLHAHQFVAPETISSLMSAKLGDDPNTYYVVATSLVIPEEPEPKVGRIIIFHYHENKLTQVAETKVDGTCYALVEFNGKVLAGIGSFVRLYEWTNEKELRMECNIQNMIAALFLKAKGDFILVGDLMRSITLLQHKQMEGIFVEIARDCEPKWMRAVEILDDDTFLGSETNGNLFVCQKDSAATTDEERQLLPELARFHLGDTVNVFRHGSLVMQNVGERTTPINGCVLYGTCNGAIGIVTQIPQDFYDFLHGLEERLKKIIKSVGKIEHTYYRNFQINSKVEPSEGFIDGDLIESFLDLSRDKMRDAVQGLELTLNGERKSADVEDVIKIVEDLTRMH

SEQ ID NO: 294 - DNA, 8062 bp, Drosophila melanogaster
ggatctatttcagatggcctccattgacgagggctcgcgcgttgagcggagattctgcgcagtcggcaaccacacgctgcggaagccgtatcgccaactgaacaacaaatatttggtgcgcttcgcctgtttgctgaacagcgaaattcgggcgggcaacctcatctgctgcaagtgctacacggacctggtgcgactctaccggaagaagaacgacaatgccaaacggcacaagatggccagggagactgccgcgagcattacggacgtcagcggcagtcagtcatcgtcgcaccaaagtgcgccctctttgcatgtctctggccaaagttccgaattcggtgcctcatacagtgaggggggcattgtgactcccgatgaagagctgtgctcccacagaagcttaagtcaagattcagacaatgtgcccactaccagcgctgcagcgatccaaaaacgccagcttgcgagggcaaacctaatggtgaaaccatcgcagaggctgagcttggcccagactactccggattgcgacgactacgaccccaactcgaatctcagtttgaacgccgtgaatggcacgcgactgccgcacattcagccgattccaaagagacgcccgaccgtcctggacaagcagtccatggatatttacttgatgggaaccacaggtggttaggtgatttttttaagttgtgactagagaacaagatacatatgctagttgatgctagtttctaagtttcatttaattagatatttttgtacgctaaaataaagaaagacagagatgttagcttggcaggagccacagaaagatagccgccatttggagatttccttgaagtttataattttaacatgtttaatgatatttacatatattatatgaatgaagtacatttattttaaaggcaccactggaagaggttcacaacttaagaacttaagaaaaaaagaggccatagatatttatttggcaggagcaccaatagatagccgacttagtttataacttaatgatgccgacattttcatgaaattaaaaaaataaataacttaacaaacagtttaaatttattcacctttctgggcagcaaatggagcgaaggtactataaattatcaataataaatcttaatggtgttggaacgaaccagtttttaaatggacagtgcaaaaaaaaaactttgaaaatgaatttcatactatttaaatacaaatatgaataataatgtaaatgtaatatttaagcgatatatttccaactatgatggaaatatcgatatcttcggcccactcgacaaccctgagcaacaacaagtacgtggtgctgggctataaaaacaaatggaactgcgctgcagttgctttagttgacagaattctcgacgcagtcacagcaaaaaaccgaaggcggctagaaatcaacaactttccagttcgagtgtttctaaattctggttatcccgttgagcaaatatcctaaattttaagcaaaatggctggacgcgatgcggcttccaatcagttgattgactacaaaaactcccaaacggtgagtgtgttggtgtgcgagcgcgagagagcgcaactgcatgtgtgtgcgtgtgtgtgccggcaggaaaataagaaaacaagaaggcaaaaagacaaaaagagaagggagaagcattgtacgaaatgaaataaacaaaaaacaagacaatttcagtaacgattgctatgagcctgtactttccattaattccattaattattaaaatgcgaaaaacaacaaaggcttgtccaacaaatgccagtaatgatgaagtcgtttccccagagttcgaagttcaaaagccgcctctctgggtcttctatttatttgtagaaatcttatcagaagtgaactgataaaccttatcagtgtggcaattcttattggatttgtgttttctgtacctaatccaaagttaattttattttcccttttatttttattttccttcttaaggaaacccaaagtttagtctagctaacctattttctaaccttgggcgacctcttcccttagtctattttcatttttcagcgctgttttcacttagcacttccattttcatttggcacttgcattgtgcattggatttgagtattcgaatttgttcgtttgcacttttgtgttaattattcgctttcgcttttggtttagattaaatgcatgatttcaattgtggaatcgtgccctcttaaaattttgaacaaatattgtttgttcacactcggaaaattgtactttcctaaattcgtggcattccacaattgcaacattttatacactgcaatcatttttgaaatcaaatatgctgttacattttataaaaaggaatgaaatataacaaaatcaatagtaagcctcacccatagatactgtatctatatataatttactcggcaatttccctgtggttttcccaatgccctctataaatcgataaatgaaataataattctgcatagctatttgtcagccagttgataggcatccaaaacagctaagtaattggcccaaatagattagatgtatcagccgtatagatattgttgagtgcccacatttggttagtaactaaagtaaatttccattggatttcgatactttgtaagtatgaattgtcagttctcaaagaatacaatcattttttgttttttaatttagtataccttttacccttttacccttttacctttttaccctattcaattaatgctaaatctagaacttagttctcgcatcagcgatttaagtgcatttgtgcattgagtcacgaagccaattactccactaactaaaagcaatcagcggtcattattttatataaacaaatatagatataaactttttgagcaacgcgatcgctggattgcaccgcttgtaagttggaaaattcgttgggagtcaatggactctgcggcgaccggctcaatgttgcacaaactggttgcagtgcgcatcgactgctagtgattcgagtgacaacgaacccggctttaaacccgttttgggttgagtgcggaaggctagaccgcttcggaaaatgcgtttgccagtgccataagtcaacgcaaattttctttctccaatttggttatgcaacctggctggaacgcccggctaaaagcgactgtatgtgagaatatgtttcgaactgacccagaaaagagagctagctccacagttggttggttggttcgtgttgttttagtcgattttgaccttctatgacgaaactgtgaaaactgcattctgtcaggcaattaaatgtttgcctttgtttcggcgaataatcatggcaactgggttctttgttcttttgggaatctcgcaatcgagttaatttgttatccaagaaattcgaaaatgcaaggaaaatacttggaatattttgcaacgcaatgcatattgcgtaaggtcattgtgagtcggttaagaaccatataaaaatccttatttaaaatcctttagcttatttcctatgcattctcattctcgaatgagtaaccttctgctgataaattatgtctaggaggcaaatttatctcatacctacaactatcaggtgcactgatcttataaagccgcctcattaagttgctgtttgccatctttgtgtcattggcatcgccaacaagttgcaattaaaaactttcctgtagactgtgttctttgcatttctattcgagatcggttgcggttctcttatcagtttgctcttcgctggagatatctacaaccaaatacatacatacatatataagaacgaaggctctgataggaaccagattgacttgttggacgtggatcgcagttccagcggttccactcgcattgtcattcccggtttgcttcacttatcgtatctgccccctgaagtggccccatattaatgtctcaaagtgcaaaacattccggctgaatcggccgaatctaaagggtgactccagtataaattccagaatgataattttgaaattatattcatttcttcgtttttatttagcgtttcttgtttgtcaataagttgttatactactggcctctttaagttgattttattattaaatagatacatatatacttctaggaactacgatttgataaagtcaactactaattccttaaacaattgtaaaagtcttagtgcccaaccgggtaatcccaacccaagtgctatatgtatctaaatgactttgttgtgaaatataaacagtagcttaatttatatgtttgacacaccaccaccaccaccaccggtggcttcactttgataaacaaccttctgtataaaattctatatgcactgttctagaaatgctttcgaattagaatttcgcatggcgttgttcaggtttcaaatacattagctaaacagtgcgcattggccggtgacagttttgcaaattgttggctgagttaattttataatgagtggctggcctgcatgcgaaataaacgataaggtgattaaggagcggtctcggattactctagggaaatgaattgaaaacaaggaggatgattagatcgactgataaatgacaggacagctggtgggctaattgatatttcagatggacaatacacttttattagcttaatggaatgaaataattaattgatcgccagctaataaactgtgtaacatcattttgatgtttgaatactttcatttaattggttttttccttgcacacggatttgatatcttgacatgttaatgcaaaaaacccatacatcatcactatattaaggcctcaagctcttaagaacacctgggatctcttattttaaatttatatgcactgcaaaatgaccccccgtgtagagataacgttctgcaatctttatgttaatgtttttttcttttggtgaaaatcgaatgattaaatgaaagtccgcgggccaaaaatgaattatcgcaataggcccgataagattgtacgacacttgaaccaatataatagagcacaatgctgcatagcattttgaaattaaaatacatttgattaaacttgactttcatttgcttttgcaggtttctcctggtgccattaccaccggcaatggagcacccattggtatcaaggatgcctcccagacggttggtccgcgaggacctatcctgctgcaggatgtgaacttcctggatgagatgtcgcacttcgacagggagcggattccagagcgtgtcgtgcacgccaagggagctggtgcttttggttactttgaggtgacccacgacatcacccagtattgtgccgccaagattttcgacaaggtcaagaagcgcactccactggccgtgcgattctccaccgtgggtggtgagagcggatctgcggacaccgcccgcgatcctcgaggatttgccgtcaagttctacactgaggatggcgtttgggatttggttggcaacaacacgccggtcttcttcattcgcgacccgatcctattccccagcttcattcacacccagaagcgcaacccgcagacgcatctgaaggatccggacatgttctgggacttcctcaccctgcgaccggagtccgctcaccaggtgtgcatcctgttcagcgatcgcggcacccccgacggttactgccacatgaacggctatggctcgcacaccttcaaattgatcaacgccaagggcgagcccatctatgccaagttccacttcaagacggaccagggcatcaagaatctggacgtgaagaccgccgatcagttggctagcactgatccggattacagcattcgcgatctgtacaacaggatcaagacctgcaagttccccagttggacgatgtacattcaggtcatgacctacgagcaggccaagaagttcaagtacaaccccttcgatgtcaccaaggtctggtcgcagaaggagtaccctctgattcctgtgggcaaaatggtgctggatcgcaatcccaagaactactttgctgaggttcgtttttttttttgtttcaaatagattcttcttcatttgagattaatgcaatcaaaagaaagataactaatatggtaattttctgaccctcaggtggagcagatcgccttcagtcccgctcacctggtgcccggcgtcgagccctctccggacaagatgctgcatggtcgtctgttctcctactcggacacccatcgccatcgcctgggaccgaactacttgcagatcccggtgaactgcccgtacaaggtgaagattgagaacttccagcgggatggagccatgaatgtgacggacaaccaggatggtgcccccaactacttccccaactcgttcaacggtccccaggaatgccccagggccagggccttgtcctcctgctgtccggtgactggagatgtctaccgctacagcagcggcgacaccgaggacaacttcggccaggtcaccgacttctgggtgcatgtgctcgacaagtgcgccaagaagcgcctggtgcagaacatcgccggccatttgagcaacgccagccagttcctgcaggagcgggccgtcaagaacttcacccaggtgcacgccgatttcggtcgcatgctgactgaggaactcaacctggccaagtcctcgaagttctaagctgagcgagcggattcgacggatcagacttggtttttggccttaattacgattaatccaatggaactaattattccaacaccaacaccaccaccaccaacaccacccattccgaaattgactaagaaaggcgaacgcttttcggatctttggttgcgggcttaaattgatttaaccacgaaatgtgtcttgtcttgttttgatattcaaaattgtttaagtcataaacaaattacacttacaatgtatatgtatatgcaatgaatatataataaattctttattttttgatataactgtttggagattctttaattttttgggtcacttatagtcgagctcttaattcccatttaaatatttcttcggtaccctgagaaattactacttcgaatgattgaacttaatcttaatcaaatttgttcctatgaaatatacatcaatttaatactttttgtaatgatatttttattaccattatctcctatgagtaaaatgttttatttctccgtaattttgtaaaaatatgtattttatttgatgaattgaaatttcagctacaagtgtccagtagatgtaaaactgtgccagtgagtcttaaaccttttcagtgaatcgcgcatccctagcagggcgagttatcgattaattcgagttatcgttatacgaaatgcatggcgcgctttgaacatcaaacaaaataagttattgaaataaacaaacgtatagtattattgtcgtttgagctttttattatttaatattttttacaaactatataaaacataaatcatctgaaaatgtacacagtatcatttaagcttagcctaccgctatttgtgtgttcattttggttcgcaatgaagtattgagtgagttgttctttaaaaatttttacaagttgaaaaacatgtatgaatatgtaagttctctcagtctagttatttaaaatattagcaggccagggctgccattgaacaaactgttctaacttttccaaatcttttccatttttatgctaaatgcaacaattaagtaacattaatttgtatttaaatatttagctgagtgcgtagaccaggtgttcaattcctgattaacagtatattgcgatacgttttttttaacacatttttctaaacagtaggtaatgcttttgtatcaaaacttttcgcaactctgaaatgcaagtatacatagttaaatatttttcacatttttcgctgtcagcaaaggcacttttcgtttaaaattccctaaattttcctcaactttatcgctgtgacgggtatgttagttatttacactaattactaactatctagtgcgtcttgtttcccagtgctgccgcggcataaatctgagcccattcggggaacgagttaaggttcggatagacgaccaggccccaggtttggcagaaa

SEQ ID NO: 295 - protein, 506 aa, Drosophila melanogaster
MAGRDAASNQLIDYKNSQTVSPGAITTGNGAPIGIKDASQTVGPRGPILLQDVNFLDEMSHFDRERIPERVVHAKGAGAFGYFEVTHDITQYCAAKIFDKVKKRTPLAVRFSTVGGESGSADTARDPRGFAVKFYTEDGVWDLVGNNTPVFFIRDPILFPSFIHTQKRNPQTHLKDPDMFWDFLTLRPESAHQVCILFSDRGTPDGYCHMNGYGSHTFKLINAKGEPIYAKFHFKTDQGIKNLDVKTADQLASTDPDYSIRDLYNRIKTCKFPSWTMYIQVMTYEQAKKFKYNPFDVTKVWSQKEYPLIPVGKMVLDRNPKNYFAEVEQIAFSPAHLVPGVEPSPDKMLHGRLFSYSDTHRHRLGPNYLQIPVNCPYKVKIENFQRDGAMNVTDNQDGAPNYFPNSFNGPQECPRARALSSCCPVTGDVYRYSSGDTEDNFGQVTDFWVHVLDKCAKKRLVQNIAGHLSNASQFLQERAVKNFTQVHADFGRMLTEELNLAKSSKF

SEQ ID NO: 296 - DNA, 666 bp, Drosophila melanogaster
taccggaggtaactgctcccgagcgcgcaactcgcctctaagacgcgtcagccgttggtgtgcgacgccttcggcatagcggttgacttgttgtttataaaccacgcgaagcggacaaacgacttgtcgctttaagcccgcccgttggagtagacgacgttcacgatgtgcctggaccacgctgagatggccttcttcttgctgttacggtttgccgtgttctaccggtccctctgacggcgctcgtaatgcctgcagtcgccgtcagtcagtagcagcgtggtttcacgcgggagaaacgtacagagaccggtttcaaggcttaagccacggagtatgtcactccccccgtaacactgagggctacttctcgacacgagggtgtcttcgaattcagttctaagtctgttacacgggtgatggtcgcgacgtcgctaggtttttgcggtcgaacgctcccgtttggattaccactttggtagcgtctccgactcgaaccgggtctgatgaggcctaacgctgctgatgctggggttgagcttagagtcaaacttgcggcacttaccgtgcgctgacggcgtgtaagtcggctaaggtttctccgcgggctggcaggacctgttcgtcaggtacctataaatgaactacccttggtgtccaccaatc

SEQ ID NO: 297 - protein, 221 aa, Drosophila melanogaster
MASIDEGSRVERRFCAVGNHTLRKPYRQLNNKYLVRFACLLNSEIRAGNLICCKCYTDLVRLYRKKNDNAKRHKMARETAASITDVSGSQSSSHQSAPSLHVSGQSSEFGASYSEGGIVTPDEELCSHRSLSQDSDNVPTTSAAAIQKRQLARANLMVKPSQRLSLAQTTPDCDDYDPNSNLSLNAVNGTRLPHIQPIPKRRPTVLDKQSMDIYLMGTTGG

SEQ ID NO: 298 - DNA, 1756 bp, Drosophila melanogaster
atgtttggcggcgcgaaacccagcttcggagccactccggcggccaccagctttggcggattcagcggcaccacaacaaccactccgtttggccagtcggcatttggcaaacccgccgcaccggcctttggaaacacctccacctttgccgcccaacccgcgcagcagtcactgttcggtgcggcagccacaccagctcagcccgccggaggcttattcggggcaaacacgtccacgggatttggaagcactgccacagctcagcccacggcttttggaggttagacacgatcatttgaagtggtatcatgttactaatttagtaatttcttctttgcagccttctcgcagccgcaacagacctcgaacatatttggatccacccagacggcggcaagcacctccctctttggacaatcgacgctacccgcctttggagccgccaagccgactatgacggcctttgggcaaacagctgctgctcagcccacgggctctttgtttggccaaccggctgccgccaccagtacaacaggattcggaggctttgggacgtcggcgcctacaaccaccaatgtttttggcagtggcaccgcctccgcctttgcccaacctcaggctacggccgtgggagcttccggagtcaatacgggcacggccgtggccaagtaccagccaaccattggtacagataccctgatgaagagcggtcaggcaaatagtgtgaacactaagcagcactgcatcacggctatgaaggagttcgagggcaaatctctggaggagctccgcctggaagactatatgtgcgggcgcaagggtccacaggctgggaatgctccgggagcttttggatttggagctcaggttactcagcccgctcagcctgcaagtggtggcctgtttggaagcactgcccaaccaagcacaggtctgtttggccaaactgtgaccgagaataagagcatgtttggcaccaccgcttttggccaacaaccggcgactaacaatgcattcggagcagcaacccagcaaaacaactttctgcaaaagccctttggagccaccaccaccactccgtttgccgctcccgcagctgacgcttcaaatccatttggggcgaagcctgcttttggacagggaggaagcctctttggtcaggcacctgctaccagtgcggctcctgctttcggacagactaacacaggattcggaggctttggaaccacagccggagcaacgcaacagtcaactctttttggtgccacaccagccgccgatccaaataaatcagcctttgggttgggaacggctgcatcagcagccacgacaggttttggatttggagctccagcaacaagcaccgccggcggaggccttttcggaaacaagcccgccactagctttgctgctccaactttcggcgcaacctccacggctagcactccgttttcaaattttggcctgaacaccagtacagcagcaacgggaggaggcctttttaactcgggattgaacaagccagcaacgtccggattcggaggttttggagccaccagcgcagcaccacttaatttcaacgcaggcaacacgggcggatcacttttcggaaatacagccaagccgggaggaggtctttttggaggaggtactacaaccttgggtggcacgggtgctgccccaacgggaggactgtttggaggaggaactaccagtttcggaggtgtcggtggttccttgggcggaggaggcttcg

SEQ ID NO: 299 - protein, 565 aa, Drosophila melanogaster
MFGGAKPSFGATPAATSFGGFSGTTTTTPFGQSAFGKPAAPAFGNTSTFAAQPAQQSLFGAAATPAQPAGGLFGANTSTGFGSTATAQPTAFGAFSQPQQTSNIFGSTQTAASTSLFGQSTLPAFGAAKPTMTAFGQTAAAQPTGSLFGQPAAATSTTGFGGFGTSAPTTTNVFGSGTASAFAQPQATAVGASGVNTGTAVAKYQPTIGTDTLMKSGQANSVNTKQHCITAMKEFEGKSLEELRLEDYMCGRKGPQAGNAPGAFGFGAQVTQPAQPASGGLFGSTAQPSTGLFGQTVTENKSMFGTTAFGQQPATNNAFGAATQQNNFLQKPFGATTTTPFAAPAADASNPFGAKPAFGQGGSLFGQAPATSAAPAFGQTNTGFGGFGTTAGATQQSTLFGATPAADPNKSAFGLGTAASAATTGFGFGAPATSTAGGGLFGNKPATSFAAPTFGATSTASTPFSNFGLNTSTAATGGGLFNSGLNKPATSGFGGFGATSAAPLNFNAGNTGGSLFGNTAKPGGGLFGGGTTTLGGTGAAPTGGLFGGGTTSFGGVGGSLGGGGF

SEQ ID NO: 300 - DNA, 3453 bp, Drosophila melanogaster
atggtggagcccaagtccgggacagctgcttctgccgctgctgcgaaagcaagcaacaacaataacaacaaccacccccgtggatctggggacagcggcatccggagtggcagcggcatttcctgcagcaacacggacaacagctgcagccagagtcagtcagacggacagaatgagctgacgcgctacagcagcgaggatgtgtcgggcaacgagtccagcgaggcgcccaacatgaccgaggtggaacgccaggcggagcttaacaggcacaaggaggagatgcagaagaagcggcgcaagaaacgcatcagctcctcccttcattcctcaacctttcaggagctgtacaagctgactggcgagattcttggcgagggagcctacgcatcggtgcaaacttgcgttaacatctacaccgatctggagtatgccgtgaaggtgatcgataagataccggggcatgcgcgtgcacgtgtctttcgcgaagtggagacattccatcactgccagggccatttgggcatcttgcaactgattgaattctttgaggatgacaagaagttctacctggtattcgagaagatcaacggtggtccattgctatcgcgcatacaggagcacatttgcttctccgagcatgagccctcgcagataatcaaggagatcgcctccggacttgattttctgcacaagaagggcattgcccatcgtgatctcaagccggagaatattctgtgtgtcaagacggattcgctgtgcccaatcaagatttgcgactttgatttgggttcggggattaagttcactacggacatctcgtcgccagcagccactcctcagttattgacaccagttggcagtgccgagtttatggctccggaagtggtcgatttgtttgtgggtgaggcacactattacgataagaggtgcgatttgtggtccctgggagtcattgcttacatcctgctctgcggttatccgccattttcgggcaactgtggtgaggattgcggctggaatcgcggtgaaaactgccgcacgtgccaggaactgcttttcgagtccattcaagaaggacacttttcttttccggaggccgagtggcacgatgtcagcgatgaggccaaggacctaatttctaatctgcttgtcaagaaggcatcgaaccgcctcagtgccgaggcagtgttgaatcacccatggattcgtatgtgcgagcaggagccaccggcaagcaagcatggcaggcgccacaaggctttgcaaacgcccagtaacatccgacgcaatcaccagtcggcaagggaaatctcgcagtttgccgaatctgctatggccgtcaagcgtgtggtcctacagcatttctcgatgcgctacgattacatgaaagagcgtcccaacatctaccagccatcgcaggcctacatggatgcctatagcgatgaaaactacaatcccaagccgccgggtcattacactcgcaatcgctcgcagcgcaatcccgcttcctccttgtgcggctacggagggcgtatgtcctcgatgcacggccagcgggccaatagccgtcggtcttcccgaaatgcgtctcgcaatgcatctgcaatttatccgaatagcgggggcttcaagacattgaacgtccacgaggaagatgacgacgatgaaggtctggaggcttttggccacatcgatgatgatgatgagtggagcaggtctaggagggaatatcagcagcaatgtgagacgctgggcgaggatcgctttaggcgtcagagcggaagcgaaggcgacgaagtggaagatgatgaggatggagagaatgaggactatcagcactataagcattactggcgcgaattagacgaggaagagggcgacgactatctgtatgagcagcagcagcgcgtcgatgataaattcggggaagaggagttcgaggacgaaccaaaggaggaaactcaagctgacaatctaaagctatcgaaagcttacgtggagcaagttggcgagaccaatgtggagaaatcgaagccacaggacgataacggtgggtatataagggaggaccttattatggataatatggatatgaagaaaaacactcagcaaagcgaatttgctaagctcaccataatgcgcaacgatgcgcagacggaggagaataagataatgcagcagcaggatgaggagaagaaagaggataaacagcaggatgatgttgatggggctaagaagcaaggaccatcaagtgatattagtgctactaccatcaccgataataacaagctgcaaacaccagttatgactacaacacacattaacaactggcaaactggcgatgcaattgaagatgatgatgttaaactattggatagtattagtgatttaaatgaaaagctacctgaaatttatgagactgcaaatattgttgtcaactcagcggcagtgccagcagcatcgacaccagcagcatcagcaacacgcccaccaaccgataacccagaggaagatgattcgaacgtgaccaaaccgacgactactgctgaggggacaacaatgcaaacgacttttggcatgtcagcggaagaggagaagcctgtagccctatcccacaccgcgggtcaccacagcaagaccggccgcactgttaactttgcccccgatgcatatcagaacgacgaggatgccgatatcgacgaggacgacgactacgatgacgaggagaatctgcatgagcacagcaagcaacagctgccgtccaatgcctacactcgtaagcagcgacagcagcaccagcggtacattgtgccacgctaccagcttgcggatcaagttcctcagaggcagcacaccgaaaactggcgttatcgcacccatcactcgcaggaacagcagccgacagcggactatcgcaagtatcgcccgccgtttagcaccggaggcggcggtggccaccatggcaacctgcagcgcaattacctggggagcttctcgcacagcggcggtgccgctggttacaagattgctccaatgccgccaccaatgcagccgcctccgcggcacaacagcgccggaagcagtggcagtggtagcggcagcggcggatctccgccatctgacgagcagtcggccatacgcaactggcgtcaggattgtgtttacgcccgcagttgcgggatgaaccagggaccggaacagcagcggcacaaccgttcgtcgggtcagcgtgtccagcagcagccgcggattggcagtggacgcttcgcccacctgcaggcggcccaattgatggacgagttgcctgatatgaggatcggcctttcgccgcccagcgagagtgtactgctccaaaggcgcctgcgccagcagcagcgggccaacgatctgtctgaagtactgcgagccggccaccgccagtggttaagggggtccactgtggacagataa

SEQ ID NO: 301 - protein, 1150 aa, Drosophila melanogaster
MVEPKSGTAASAAAAKASNNNNNNHPRGSGDSGIRSGSGISCSNTDNSCSQSQSDGQNELTRYSSEDVSGNESSEAPNMTEVERQAELNRHKEEMQKKRRKKRISSSLHSSTFQELYKLTGEILGEGAYASVQTCVNIYTDLEYAVKVIDKIPGHARARVFREVETFHHCQGHLGILQLIEFFEDDKKFYLVFEKINGGPLLSRIQEHICFSEHEPSQIIKEIASGLDFLHKKGIAHRDLKPENILCVKTDSLCPIKICDFDLGSGIKFTTDISSPAATPQLLTPVGSAEFMAPEVVDLFVGEAHYYDKRCDLWSLGVIAYILLCGYPPFSGNCGEDCGWNRGENCRTCQELLFESIQEGHFSFPEAEWHDVSDEAKDLISNLLVKKASNRLSAEAVLNHPWIRMCEQEPPASKHGRRHKALQTPSNIRRNHQSAREISQFAESAMAVKRVVLQHFSMRYDYMKERPNIYQPSQAYMDAYSDENYNPKPPGHYTRNRSQRNPASSLCGYGGRMSSMHGQRANSRRSSRNASRNASAIYPNSGGFKTLNVHEEDDDDEGLEAFGHIDDDDEWSRSRREYQQQCETLGEDRFRRQSGSEGDEVEDDEDGENEDYQHYKHYWRELDEEEGDDYLYEQQQRVDDKFGEEEFEDEPKEETQADNLKLSKAYVEQVGETNVEKSKPQDDNGGYIREDLIMDNMDMKKNTQQSEFAKLTIMRNDAQTEENKIMQQQDEEKKEDKQQDDVDGAKKQGPSSDISATTITDNNKLQTPVMTTTHINNWQTGDAIEDDDVKLLDSISDLNEKLPEIYETANIVVNSAAVPAASTPAASATRPPTDNPEEDDSNVTKPTTTAEGTTMQTTFGMSAEEEKPVALSHTAGHHSKTGRTVNFAPDAYQNDEDADIDEDDDYDDEENLHEHSKQQLPSNAYTRKQRQQHQRYIVPRYQLADQVPQRQHTENWRYRTHHSQEQQPTADYRKYRPPFSTGGGGGHHGNLQRNYLGSFSHSGGAAGYKIAPMPPPMQPPPRHNSAGSSGSGSGSGGSPPSDEQSAIRNWRQDCVYARSCGMNQGPEQQRHNRSSGQRVQQQPRIGSGRFAHLQAAQLMDELPDMRIGLSPPSESVLLQRRLRQQQRANDLSEVLRAGHRQWLRGSTVDR

SEQ ID NO: 302 - DNA, 6115 bp, Drosophila melanogaster
atggccccagcgctcacagccgagccactaagtccaaaggagaagctaaccagcaccgcctcgccctcggcccgcagctcctcggaaagcggaggagttggatgtgcagttggcttggtcaagaagccggcaacacccacgccggccacggccaccacgcggattacccgctcatcagcggcagcggcctcagttaccgcttccccgcatctacaacagcagcgatcctcgctagcaatcaataacaagcgaaagtcgggcaacgctaaagccagcaatgaaccaatggggctgagcacagccccgactccacacagcaccacttcaccaaatccctcgacggatactgcggcagcctccacctctgccgtggagcacaacaataacgacagcaacagtacctccgccggcaacagcacctccgccgacaacagctccacgcccaaggacaactccaccgctcagctactggcggatctaaccatcaactttgaggagaccatatccgcggagatttgcctgaggaaaaccctacccgatgtgagtctggggaaagagccggttccgcctgcctcggtgctggcagtggccacaagttcaacgagtgctggcagcgctctatccttatctgcagtggatgaggtgaccaagatagaaatagataatatagaaggtgggtctaaggaatcactccaaataaatagtcttgactcaaaatttctctcgcccactgtttcagagcgtctcagccagctagatgggaatgccactggaaggcccgaggagcatgtggcaccaccttctgttccggtacccgtgcaggaggcgccaaacacgcccaccaggccacaggcgccaccaagtgcccatcttgagtctccgcagccggcgcgaacacagcagcagtccattcaacagatgacgccgcaaagcaccaccagttccaacaattttctcaaagacggagcagctggtgctgttctagaggatcaggatatcgaggaggtgcttaaagcgctcaaaacatttgacggtggccatgttaatccagataccatttgcgagtttttcgacgaagtttgggaagaggcagcaccggcagcgccattgccgcccgcgccacccgaaaatgtggtggatgtgccgggcgcgaagcccagctgcagtggcatcctcgttagcggcagcaacatttcccagccgaatgtgattattaagcaggagcagcggccctggcaggagagtcatgctgagttggagcagcagcagcacgttatctcgcgcaggatcgagtttttgctacgcaggatgcgcaagctccaggcgcgagcgatgtgccgtcacgcgagcgaggaggtggttggtatcatggagtggtctgcccgcagttcccataaggctccagttccagcgagaagttccacgctgactgagcaggaggccactgtcctatcgattgtctcagggcgtccgagctcaaccttctgggaggagcagaacaagcatccgctgcctgctagccagatgagtaatgtgatccggcatattgcgacggcggcaaagcatcagcaaatctgccactcagccagcggaagctctgctactctggcgccatcctccagctggtacaacagctgcaacagctctgcgctgccgatgaagcgtccacgaaagaatcaacttgatgcttcggttgcaacgggtgccacacccactgcacctgcgccaggagcggtaacatctagacaggcagctggcacgacgggatccgcaacgggttcgaatacaccgcgggcggatgatatcgtgcccggctacgacacctatgtgactaatgaactcacccatgtgtctggcctgctgcacacggagcttcgagaagtacagaatgccatcgactcggacgccacggagtcaagttctggtggagaatccgctgacgagatggtaacctacaacaacaaccagcagctctcgctaccaatgtgagtacttcgtattatttatgtacatacttaggttatcgggaatattttacaagtaaactttcttccatctttttttgaggggggttttcagcttctgtcatctttttaagatcattcttttgctatagaatttgtccgattaatgttggctcggtagttttctttcaaaattgttttgctttgacaggcattttaaacatgatttaacgtcgtccttagcaattgaaaagttgtaataggctttgattagagttgttgtacctaattatcgcatttacaatgcgatatttcaactatttcaacagtttttattaaaattgttaattagcgattatatatttcttttagctttttttttgtggtattctctttcctaatgctcttgaaatttgattctttgcagcactcgacgcgctgtctggcgatattcgagagatcgtgcagccattgccctgcgctggtcctggctctgctcccagctgaccgatttggagatgaagatccgtcagcacagcgacctttacatggatctaactcagtccaagggcgagatccagctggagtccacagctaagacctcaccgtcgctagcacagccggcaaatggcattaaggaggagcccggatccgactacctctgcagtcgggcacgtccattggtgctgtccgagttccgcaaacgcaagctcttccagaccacgaacatgcacacgatttccaagaaagccgcacgccccagcaacattaagtgtggctgccagtggccgcaggtgccatgcacactgtgcacgggtcggacagaccctacggcgcccagggatctggtcgagacgatgatgccgcaaaaccgggtggcattgctcgatgctggctaccatccagtgctcagcttcgccagcggtgagtgggaggttacactgagtggacccatttggttttcgtccatgattatttcttatcatctgtgatggtttaacattatttattctacacttgagatttgaactgaattgattaaaaagtaaaactttaaaatgcaatacttgcaaataatttttattcgaaactaaaacattaaaatcctcgtattctttacattggattccaaaatgaaaagaaatagtcggatgatgacagctaaagtggaattatgtttgaatatattcttatccctatcattcttgtttcccagatgtcagtcagtcggttcacttggaggccgttgcccgccagccggactggcagtaccgcgtcatgcgcagccagcccaaggccattgtcaaggccatgtggaaggcggagcgcgagacgatagcctcaggcggtgtcggcggacaaggtggcagccggcggtcgggcgatgcggcgaagcggcgttatatacgacgcaaggagcgcaacaacaactcaaataaggaggctgggagcggagctaaagctgctgctgtcgccgcaggaggagcaggcggaaacggaagcagtagcgtcgggggaggggatagcggaaacggtactggtactgctactacttcttcttctactacgcctactacaacgccacttgtggccaacagtaaattattgtaaacatgacgaaattcgataattgttattaacataaaacaacaacaatcttttgcatctcttcttcttctttttctttgcatcgatcaaccaaaacacgaaattccaccaacaccatcaacaaacaccaccaccaacaacaacaacgaaaaaccccaccaattgttttattttgccattccgttcttgtctccgtttcgtccccgttccgcatccaaatcacggacttgacgcaacatcagcagcggccaggggcaagcggcaaccacaacacccaactggagcgaacagttccagctcgctgtggccagactctcgccaacgccaacgacaacgccaccacagtccctcctcaacctcgatctcggcactgagcggcgctaagaaggcacgcaaatccgcaaccaacagcagcagcagcaattccacacagcagcagcagaatcaccacggcaccaaaatcaacaatcatcatctcaatggctacggcgatcagtggggggagcaaagcaggagtcgtcgcaactcttcgccctccaacagtcataaaaatgagaggtatgtttcggattcaataactgatcccagggattcgcgataagtagtcctgctttttttttataagatagattgttatatataatttatatgtatgtttcccttgcagaacctctgagcgtcgcgttcgtcccatctacgacatcaataacatcgttataccctacagtatgctagcccagtcgaaaatggagataattccctacaaggaaatacccatacccaagtaagtattcaattttgcgctaagtccttattttatatatatatgtcgcataatgtaaaataccaagatttgtgtatatctattaaaatcacccattccatctttgctttcaggtggcgcattgtagacagtgataacgataagggaaaacattcgtcagatgagtcaatggagcgcaaactgagcaatggctgtgtcgcatcaaagtcagaggagctagccaaacaacagctaccaccaccaccagatcaagatcaagagcagccggccctgcagcctccgaaggttaatggtttaaaggaaaatcaagcagtcaagcacaataacaataataatacaaacaataataataataaaaatggactggtaaatggtaacgccaaaaaggatgaacttaaggctgcagaggatcacgatacgcaatcaaaagaagacgacgatccaaaggaaaaggtggtcaaacccaagctcaacggaaacttgataaagaatccgattgacaaaactgccgaaacgcaagacaaaattgctcagccagcaccagaaccaccactgccaaagcgacccaagctggaaactccaacctccaacgaggtcaccaaggctaatgggcagttggtgcagcaacagctggaatcccgtgagagcgaggaggagccacagcatgtcgacgaagatctttcggatgaagcgtttattatgcgacatcagcgagctcttctcgaggagcgacgccgcttcgagactttccttaagttcccctggagcacccgatcgcgtgcaaataggcgcgtcgatagtcgtgccgaatctagtggcgccaacacaccggatcccgcctcaccagctcctcatctaggcggccctggtcacgacaacgaaagcattccctcgccgctggcgtacccactggacgcttttaacgaaagcggtgagctgctgactggcggacaggcacgccaagctcgtcgtcggactacgtctagcaagcttaaggatcagctggaacggcgcagcaccacgcccgatctgcgggaggtaagtcgatgtccaagtttcacatttgttgaactcatatataaaataaattctggttgtgcctattacttttgccgaattttgttttcaaactgctttgaatgttcaaatactgattgtatagaatagttttctaattgaaacccttttcctttttgtatagtcttacactgtgatgccatctccctttgagcccttgaactttccgctctccgacgaggtctaccagcgattgctagccgagacatatgcgccgcccaggtcaatgaccgtctcaaagcgggccaaaagcaagtcgatatcctcgaactgtgatggtgggaacaccttcacaggaggcagcggcagtcggcgcagcagcaagtgcaagattaagccaaatggtcagctaaatggccagctcaatggccaccctgcggcggcgaagttgaacggaatagatgcggcaaatgaaggtggaatttctgagccggaagaggaagagatgctgctagaagacgaggatgacgactatcccaagcatcatctggcgccgctggatgacgaggagccgtcgacaccagatgtcgagcatgagctttacgactcggcgatcgatgcctatctcgctgatccggaggcgctagaggaggatatgggcgaggatcccttcgaggacgacgatcccaacgatccggagtggaagacacggaccgagggtgttcgcagcagacgcatctaa

SEQ ID NO: 303 - protein, 1569 aa, Drosophila melanogaster
MAPALTAEPLSPKEKLTSTASPSARSSSESGGVGCAVGLVKKPATPTPATATTRITRSSAAAASVTASPHLQQQRSSLAINNKRKSGNAKASNEPMGLSTAPTPHSTTSPNPSTDTAAASTSAVEHNNNDSNSTSAGNSTSADNSSTPKDNSTAQLLADLTINFEETISAEICLRKTLPDVSLGKEPVPPASVLAVATSSTSAGSALSLSAVDEVTKIEIDNIEERLSQLDGNATGRPEEHVAPPSVPVPVQEAPNTPTRPQAPPSAHLESPQPARTQQQSIQQMTPQSTTSSNNFLKDGAAGAVLEDQDIEEVLKALKTFDGGHVNPDTICEFFDEVWEEAAPAAPLPPAPPENVVDVPGAKPSCSGILVSGSNISQPNVIIKQEQRPWQESHAELEQQQHVISRRIEFLLRRMRKLQARAMCRHASEEVVGIMEWSARSSHKAPVPARSSTLTEQEATVLSIVSGRPSSTFWEEQNKHPLPASQMSNVIRHIATAAKHQQICHSASGSSATLAPSSSWYNSCNSSALPMKRPRKNQLDASVATGATPTAPAPGAVTSRQAAGTTGSATGSNTPRADDIVPGYDTYVTNELTHVSGLLHTELREVQNAIDSDATESSSGGESADEMVTYNNNQQLSLPITRRAVWRYSRDRAAIALRWSWLCSQLTDLEMKIRQHSDLYMDLTQSKGEIQLESTAKTSPSLAQPANGIKEEPGSDYLCSRARPLVLSEFRKRKLFQTTNMHTISKKAARPSNIKCGCQWPQVPCTLCTGRTDPTAPRDLVETMMPQNRVALLDAGYHPVLSFASDVSQSVHLEAVARQPDWQYRVMRSQPKAIVKAMWKAERETIASGGVGGQGGSRRSGDAAKRRYIRRKERNNNSNKEAGSGAKAAAVAAGGAGGNGSSSVGGGDSGNGTGTATTSSSTTPTTTPLVANTARGKRQPQHPTGANSSSSLWPDSRQRQRQRHHSPSSTSISALSGAKKARKSATNSSSSNSTQQQQNHHGTKINNHHLNGYGDQWGEQSRSRRNSSPSNSHKNERTSERRVRPIYDINNIVIPYSMLAQSKMEIIPYKEIPIPKWRIVDSDNDKGKHSSDESMERKLSNGCVASKSEELAKQQLPPPPDQDQEQPALQPPKVNGLKENQAVKHNNNNNTNNNNNKNGLVNGNAKKDELKAAEDHDTQSKEDDDPKEKVVKPKLNGNLIKNPIDKTAETQDKIAQPAPEPPLPKRPKLETPTSNEVTKANGQLVQQQLESRESEEEPQHVDEDLSDEAFIMRHQRALLEERRRFETFLKFPWSTRSRANRRVDSRAESSGANTPDPASPAPHLGGPGHDNESIPSPLAYPLDAFNESGELLTGGQARQARRRTTSSKLKDQLERRSTTPDLRESYTVMPSPFEPLNFPLSDEVYQRLLAETYAPPRSMTVSKRAKSKSISSNCDGGNTFTGGSGSRRSSKCKIKPNGQLNGQLNGHPAAAKLNGIDAANEGGISEPEEEEMLLEDEDDDYPKHHLAPLDDEEPSTPDVEHELYDSAIDAYLADPEALEEDMGEDPFEDDDPNDPEWKTRTEGVRSRRI

SEQ ID NO: 304 - DNA, 2655 bp, Drosophila melanogaster
tactgcccgcggttcttttctagccctcgtggcaatcacctacgtcgagtgagctttcggggttttggtccatgtcaacgggttctttttttgtcggtttaaggttgacaaacctttttcctagtacatttttgagttgaaaagctttctagtttgcttttcggtaggtttttttcttgaggcgatcaccgaggatctcaagtcgttagtttttaacttcgcgtttgaagagtccgacaccttttttgtgtccttctggtttgaaaacgtcggtggtatctgtcaagttgtttttcagattttttcagagggtttttgctccctcttaatacccgtctataagtcttcgacagcggggtgtgcccttattattaagtatcgaagtatttcgtcatgttgcttagcgatttattagagttcttctttctgaaccaccagtcgttcttttactctcggtagcggtacctgagcgacttcttttttagccttttatagtcgaacttccttttcattctggaaggaagaagttatgtcaaggacggacgtcactcgaataagaaagtccaactgtttataccttgacctcgactgggttgacttttgactagaatagctcgtcgtcctcttcttgcgtctcttgtaggtcttcatgtgcctttagttgtttttcatgtgggtgacgctcgttgtaatgctgttcctcgacctttagtaatttcatacacaactcttctttttaagtctcgaggctctacgagttagggcctaccgggacgtccgcgttctccactcaaatgatataaaattttatatatctatatttaaatatatatagatgtacacatagagtgaaacgtcgacttattatacgtcgtttgcttagcactcaatcgacctcggacgctcttaatatttttcctaaaccttcttcgtcttcaccggtttagatactaagatgtacttgaatggctagagtttctcgaggtgcttctggatgtcgaagttaaacttctacacagacgtgttttccttttcaaactccacccaatgtgaccgaaaggaacataatctaatattgtaatacaagaggtgtccgtttgtaaaatgttaattcgtcgctgaatttacgtttctacgaactgacgcgggtcgaacttctagcgtaactcgtcgacggttatctccggttgtttcgaaacagctttgacgttgcactaaatcttcggtcacttaacgtcaagcacctagtcgttgctaactgactagtccgttgctcccttgagcttgaacaagcgttactctatttatgcaaattctgagaataactccttttcctttcttctgtacaaagggattcactacttgattgagtttactgcctctctaactcgctcgagcgactatagttgctttcaatatagttactcaactgactttgttttaacttcgtgagggtcctttattttctagttcgtctacggatgctccaaccagactttttatgatttaagtataaaataacatagaactaataaataagaggaactgtctaacaacaagttctcaattttctctcgaacttgttccgaagtcaactaaaatgagtcgatttttcgttgtcactcttcgatgtgtttctttgggaagacgtccagaggcttgacgtcctttttgaatatctttaccacagggtagcgtcgttagtccttctcgattatttcgcagaaccattactttaagttcttttttgagtattaaaacttcttcttgagttttccgttgtcctcgtcgaacgattagtttacgtctacttccggtgacttcaactctcgcttttattcgctttgcgacaactttatgtttttgaatttagacttgagcttctttccttatttcgaaaattccgagttgtcctatttaaccttataaactaatcactagtactatgcgatttctcgcgataatagttagaagtccgacttttcttcctttagctctcacttaataggtgccggtttcaatttaaatcgctccttaatgtcagagtctttctattggattaccattctgaatatttaagaaaaagtaattggaaaaaagatgttttactaaataataaaaatatatctttttccataggcttaacctcgaactttaattttcttttctttggcttaactaacttgaactcgcacttttcttgcattcagatagcctgagtaatataaagtacaatatataaattttaacgggttgtcttactttaccgacacgatgttaaattttacttagcttaattgacggactagctggttggtcactggtgttaatttgtcgattttctaaggtttcccggttggtcttgactctcgtaaggatgattccacgttggccttttatgtctgcttaaaagttcgtgacggtctttcgcattacgagcagcagttttttaatggtgtataaggaggctgaaactatcgccgctactatatggtcactcataaacaattaacgtggatattagctttaatttaataacttgaaaataatgtctagcacccgttgagaaattcgccgtttgcacggtttaatacacgcgggtagttcggtgttttattataactatacaagctgtacaacttcttaagatttatt

SEQ ID NO: 305 - protein, 689 aa, Drosophila melanogaster
MTGAKKRSGAPVQQSKIEAQTSQAVEKTQEDQTFAATIDSSTKSLKKSPKNEGELWADIQKLSPHTGIIIHSFIKQYNESLNNLKKKDLVVSKKMRAIAMDSLKKKSENISLKEKLTNMELELTQLKTDLIEQQEKNAENIQKYTEINKKYTHCEQHYDKELEIIKVCVEKKNSELRDAQSRMALQAQELNNMQQTNRELAGACENYKKDLEEAEVAKSMILHELTDLKELHEDLQLQFEDVSAQKEKFEANILQLSSDLNAKMLDCAQLEDRIEQLPIEANKALSKLQRDLEASELQFVDQQRLTDQATRELELVRNEINTFKTLIEEKERRHVSLSDELTQMTERLSELADINESYINELTETKLKHSQEIKDQADAYEIVVQELKESLNKASVDFTQLKSNSEKLHKETLLQVSELQEKLIEMVSHRSNQEELIKRLGNEIQEKTHNFEEELKRQQEQLANQMQMKATEVESENKRNAVEIQKLKSELEERNKAFKAQQDKLEYLISDHDTLKSAIINLQAEKKEIESELSTAKVKFSEELQSQKDNLMKKVSELELEIKRKETELIELEREKNNEMAVLQFKMNRINCLIDQPVTTIKQLKDSKGPTRTESIPTKVQPENTDEFSSTARKRNARRQKITTYSSDFDSGDDIPIVGNSLSGKRAKLCAPIKPQNNIDMFDMLKNSK

SEQ ID NO: 306 - DNA, 8739 bp, Drosophila melanogaster; identical to SEQ ID NO: 214

SEQ ID NO: 307 - protein, 724 aa, Drosophila melanogaster
MGSQNSDDDSSSGSSRSGSRSVTPQGGSAPGSQRSRRSGSGSDRSRSGSRSSRSRSGSGSPRSARSGSAESRHSQLSASARSKRSRSAHSRRSGSARTRKSGTPESPQSHRSGSLQSRKSGSPQSRRSGSPQSRKSGSTHSRRSGSAHSRRSGSARSRKSGSAQSDRSESRSRSHSGSLKGNEESRSNSPNLQIDVERANSKSGSRSRSRSRSGSRTSRSRSKTGTPSPNRSRSGSASGSGSDVGVPKKKARKASGSDQEKKKSGSDSDIEESPTKAKKSRLIDTDSDSNQDVGKKAPAAADIFGDAGDISDDEDEAGPAARKSPVRSKSRSQSKSHSHSRSMSHSRSRSRSRSRDKVESQVESAPKEDEPEPLPETRIDVEIPRISADLGKEQHFIKLPNFLSVVTHPFDPETYEDEIDEEETMDEEGRQRIKLKVSNTIRWREYMNNKGDMVRESNARFVRWSDGSMSLHLGNEIFDAYRQPLLGDHNHLFVRQGTGLQGQSVFRTKLTFRPHSTESFTHKKMTMSLADRSSKTSGIKILTQVGKDPTTDRPTQLREEEAKLRQAMRNQHKSLPKKKKPGAGEPLIGGGTSSYQHDEGSDDENAISLSAIKNRYKKGSGAGQREVKASTIYSSDEDEGSDFEARRSKKVDKAKASKALRDSDSESDAGSAKSGHSNKSGGEGGSASGSENEGSQKSGGGSSKSASGSGSGSGSGSGSGSDND

SEQ ID NO: 308 - DNA, 201 bp, Drosophila melanogaster
atgagtctcaggcagtttcagaacatttcccgccaggccctcaggtgctactcgatgaggcggacccctggccccgtcctcgagctgagtcgcggtcagaggcagtgccttcgcctctgcaccatcatgcttcccgtgagctgtgcggccacgcccatgaacgccatctcctcagccgcccagcactccacagcagctgcc

SEQ ID NO: 309 - protein, 67 aa, Drosophila melanogaster
MSLRQFQNISRQALRCYSMRRTPGPVLELSRGQRQCLRLCTIMLPVSCAATPMNAISSAAQHSTAAA

SEQ ID NO: 310 - DNA, 2491 bp, Drosophila melanogaster
tactacgagtgtaggtatttgttgaggaaactcgtcctgtgggtgctacgcctgcggttgacgctgcccgggctggacctgaagcacatgcgcctgcacctaccgatagtcttgctctagcgacttgacatatcgatgtgcctcaagtcgctcaaagtctacttgcacttccggaagctcctggtctacctcgacatgctggacggcgggttgaccgtcttcgtcctgaggcggagggtcgcgccgtagcactacttcgaccacctggtcgacctccagaggctagctaggaaagcgtacgtccggcgggccacgtaggaaatggaccgggttccgacgacccgcctccaagtcagcctgctcctcgtcgtggtctagtggtccctgttacacgaccacgagatggttgagccgcagaagcggaggaagtagctggacgagttgtacctctagctttcgcggacgagaggcctgtaacaccggcagttctagtgattgcagtgcgaacacctgaggtgcctgtaagcccactaggatagacacgagatgtagtagtgtctttgctaagcgctacttttccttttcccgtcgcttctgatgtctctcgaccggctgaggaaacacgttctttagttgagtggtgatggtctaccgcttgaagaccggcagttcgacaacccgtactagtgtgccaaaacgtcaccgcgtcgtggcgtcaaggggtacttcttccaacaggaggacgacacctttcaaagcgacgaccctgaccctccgtacctacacgagttcttagagttcttgctcatagctaacttccacccaaaccttgggtagtggctcctgtgcgacctccaatggttcacgtacgctcggtcgagtggcggccggtgtcgatgactatatgacctcttggtcatagggttcgccttgaagttcattcgcctcagaatctagtgaatacatgtgaaaagttatgtaagtaaaaggaacggcgtgtctgcgagggactacttcgtcgcaaaaaacctgctcgggctcgtctatctgtacctctacccgccgttgctcccagttttattacggttgttaccgtcgccgttaccgcctttgcccctccttcttgagagagtcatgatggctgggatgctactggggagaagcagccgtaggtggtggagctgccgtttaggtttgttggtcggatcggattgtgtcggtgggcgacgacacggaggccatgtctagtgccgagcggacgggacctgcggattccacgctgttttcctgtaactggtcaaagacctgtaaagcgccttattcaagtagcccataagtgactaaccactggtgctctcagaccgacctgacggcgttgggtaagtgctcccgaaattctgcgacgtcgccgtgtacatatactcggaccggctacacgtttaattcttcctcctcctgtatcgatccttggggtaaaggtgcgtgctcctgctttagtttgactggggccgactccacaacatggttcggtaggacggtttggacggcgtcatatactagcgggaagagttccaggacgaccgtcgaagcggttgcaggttcaggttctgcctctcgtagttgtattaccggctacacgacggatccttctacggcgactgccggtgggttagttgtttcgattggcagctgtaaccagccgtgttcctctagtaacacttccgacagagccggtagtaggacgatataaatttcgtaaagttctatttggtacaaatggtcaaactcaagtacagcgtcgtagagcacaagcggttgacgtagggcgaccaaaacttcaagaagttagtctgttagtgcctcatgcacttgtggttcttgaggtaaggagacgagctaaagggcagcacacactaaccactcgttggcctaaactcaccgctatcgaaacacataccgcctctctacaggctattcaggatgagaaccgccttgcacaagaggacgtatttggacgacgcgtaggagttgttcgactagttcaccttcgtgagcgctcactactacgaccaccataagttcagccgtggttaggacttcttctgcgaattccacgcggtgcggtactacgtcgacatgcacgacttcgacgagttctacgtctggttcatgaacccggcggtcaccgccttcaggttatacttctggtactcacgttaaatgcggttccacgccgtagcagatttgctgctaacccggaaaccgttgctgaacctcagcgcagggaccctgaaggtccgcctcctcacatgcgacgcccggacgcacctagctaagttggacgctgcgataggccttcggtgggtcttcacacctttgttgccgtgccgtcgagtcttacgcctcttgcgggtcgttaggttgtactaccgcccgttgttacctacaccgttattaccgctgcgtttaccgatacctttgttgccaccgc

SEQ ID NO: 311 - protein, 809 aa, Drosophila melanogaster
MMLTSINNSFEQDTHDADANCDGPDLDFVYADVDGYQNEIAELYSYTEFSEFQMNVKAFEDQMELYDLPPNWQKQDSASQRGIVMKLVDQLEVSDRSFRMQAARCILYLAQGCWAEVQSDEEQHQITRDNVLVLYQLGVFASFIDLLNMEIESACSPDIVAVKITNVTLVDSTDIRVILSVLYIITETIRDEKEKGSEDYRELADSFVQEINSPLPDGELLAVKLLGMITRFCSGAAPQFPMKKVVLLLWKVSLLGLGGMDVLKNLKNEYRLKVGLEPITEDTLEVTKCMRASSPPATATDILENQYPKRNFKRSLMKQRFLDEPEQIDMEMGGNEGQNNANNGSGNGGNGEEELSQYYRPYDDPSSSASTTSTANPNNQPSLTQPPAAVPPVQITARLPWTPKVRQKDIDQFLDISRNKFIGYSLIGDHESLAGLPQPIHEGFKTLQRHMYMSLADVQIKKEEDIARNPISTHEDEIKLTPAEVLYQAILPNLPQYMIALLKVLLAASPTSKSKTESINIMADVLPRKMPLTATQSTKLTVDIGRHKEIIVKAVSAIILLYLKHFKINHVYQFEFMSQHLVFANCIPLVLKFFNQTITEYVNTKNSIPLLDFPSCVIGEQPDLSGDSFVYGGEMSDKSYSWRNVFSCINLLRILNKLIKWKHSRVMMLVVFKSAPILKKTLKVRHAMMQLYVLKLLKMQTKYLGRQWRKSNMKTMSAIYAKVRHRLNDDWAFGNDLESRPWDFQAEECTLRACVDRFNLRRYPEATQKCGNNGTAAQNAENAQQSNMMAGNNGCGNNGDANGYGNNGG

SEQ ID NO: 312 - DNA, 2406 bp, Drosophila melanogaster
ccggcgctatatggtggtgaactcctcgtgtggatactgcacctccctgaccgtctccgtgaccatgaccgtgaccgtaatggcaaaaggaagggtaagcgtatgggtaaaggtaaaggtcggccgacgtaccagtcgctagcatgccatctacgctaggctaagctaccgttttcttaagggggaaagccacattaacgaaaaccggaccagctttcagccgggcttgccttggcttggcttggcttcgtgtggtgtggcttggattactattatgggcgctagattatccttcgtgcactacgcgtatgacgggtggctagtaattcttcgtcgttacgtgaacctctttgatctccttagcttagtatttagaagaatgtatgtatacatatagtcgtcaacatagttcattgtctcaccccaccaatacaattggtaacgtaaaacttgaatttatttattaagttaggtttttgttatcattttgggatagttaaacgtgatatggtcgcttgaaggaaatacacgttggcatgtgccccgccgcctcagattactttagccttagcttgacgtctgacaacacctcagatctcagatctctgatctctggtctggggaccgatctgtttaacgtgtattaaagatgagctcactcgcgccagtcggccgtttttcacgtggcttggacgggttttgttgccgttgccctacctacacttacacctatatcggccaccgatatatcatcatgaccatggtgagctgaaccaatctacagcctttttctgcagctgttgctgcggcgtggccctcctagggtcggtaaagtactttttaatacagcacatgttaaaatacgtactctctgaacgtgtcgtcgtttttgacccgtcgttttttttgaaccgttttaattgtcaccgagcagtcaacgtgagcgtcaacgtcaacgtaaacgtgccaccacgtcacggcgtcaccggcggtccaacctcctctattcggcgactgcgactgcggcgacgtttacccgtgtgcgtgtgagctctcggtagttgacgttgacgttaactccgttaccccgccatgtcacccagcctaaccatgagcgtgcccattttcgacttcgactacaggccaaccattcttacggattctgctagatgtggtgtagatgtgtctaggatttcctatagttttttatatggatatgtagatataatttagtatacgaaacaagcccattgacgaaaagaccagggtgacacgaccctttcgcttccgacaacgtaatcgtatgttcacaacccgtcgcggtgtttcagcgtgttaactttccgtctttttttttacctttctttttgtctccgtcatcactgttgttaaccgggcgattgcttggcgggctgcctgcggcggggtgggtggtcaggggtaaagggaggacttacttgggcgactattactttccccctttaaccccccctccgcgtccttggcctcgtcctcacttatacctttaccgtcacctacaccgacaccgacaccttctttcgcgtaagctcgcagaacggcgaacgtagaacggtgcggtgggctgggtttaaggtcaacttacgtgaccggtcgcgggcggaaacaccggtatcaggtcaacctatcaacgtaggcgtagagacagagaagtgttcagacacagtgaccgggttacggctgtcgaagttttcgcggcatgaaaacaagactggtccccaatatatatacatagaaaatagaaatttattgatatatcaccttcaacatcgtaaagctagttgattgtagatccattcgagggatttgtcgtatatggggtggggcaagataccgtaagcgtaagggcgctccgcctacgtcttttagcacctcaccggttcgcgagagagaagcgagccaaccgtattattatcgtgtaaggagccggttggttgttgttcgaccgacgttagcctacacctacaccggttcatcctcatcgtcagcagcagcctcaaaccttaggcgaggtttacacccgcagcggggccggttacgacgggccggatgatctacgatgctctgaggggaggggggggagaagcagtgatagacgcaccaagggcgacagttgcgtactaaacgatatacgaagggcgagcgtacaggcctagactacataattactgtaaaccgggtcaaagcaacggaggtacggtacactcacgtcgcacgcctgctggccgctagcgacgctcacctcctccgagtaagtataagtatttaaattgcagaaaaacgcattcggagcgtcgccttcatcacggggagggtgttagcagcagcggcggagacggcggtggcggcggcggaaaggactagact

SEQ ID NO: 313 - protein, 105 aa, Drosophila melanogaster
GRDIPPLEEHTYDVEGLAEALPAACCSCICTVVQCRSGRQVGGDKPLTLTPLQMGTRTLESHQLQLQLRQWGGTVGRIGTRTAEVVPLPQSSSPPLPPPPPPFLI

SEQ ID NO: 314 - DNA, 1910 bp, Drosophila melanogaster
gacggcgtagagttcttacggacgatacgggacctccacggacagttctttgttgtcgatgtcttatcggctgcaggttgacacctcacctaagacgggagacgcaaacgcgttgtcctccaccttgatgacctgagtaacttcttcgcgtctaagctccggatacaccttttgcaagcctaacatggatcgcgacccgcgtcacgtcggttttagctcaaagtcgacgtcggtgtccagaaacatcttgtcgaggaggtttgatttctctaacgaaatgtaggaagcgggaaacgacgccttgtgtatcaccaactcatgtcgagcgggttgtatcggtttgggaaggtgcacccggtggacgcgaggtgttagtagccgttacaagaccggttggacgtactcgtaaacccgatggcgtgttgtgccaacttgatagaccccctaaccccgtgcgttaaacctgatgaccataaccctcaagttgacgacttacattcgctgtttctctacgttgataggggttatctttgcgacatgtttaggatgcaccggcggttgttccgacgacttgtttctggactttagcgcgttgtccgctccctggagaagcggcggaaccttcctccttgcctatttagttaccggttctttaccgtcgttatgtctttgatgtgatatctcctagataggtttcagatattgtctaacccgcaagtgaagctatcgatgcttacccttagggtcatgagggtcgtcgtttaagtcctacaagacctgtttgacgcttcgcgacctgaggaggtcggcctcgtgctaccagcactctaacagcaccacctgccggctgcgtaaggacactagttctcattacctaggtgaaacatggaccggtccctgtatcgacgggacgacctctctgagaggtccaaggtcaagagtgcgaacgagatgcagcacctgttaccagttcgcctagtaaaattacgggaaaaattttgttgccgtcgggacctactggcggattcagaccttgtcgacgttgtacactttaaacctgcgtaaataccctactcgtgagcagtccctttccgttagaaagattttctacaggatctacttcgtgctctgtattacgcccttttcgctttgtattcacggtcatccacttagtatatgaatgctttagattacttgcaactcacaggttgtaacaaagaatcgatggtctcttttaatgttagacctactacttgtacatacactataaaacccgcacagtcggcaggaccagttacaggaattcgtcgcttccgttgctctagtgctcaagtcgaccgtcgtccgtgaggttcatttaccactgtgtccttagttcgaagttatgtgtgtgacggcggacgtgtcaaacgacctattaaaggctctacatctagacctgctgtaattcgggctgaccttcgtaaagagatgcctcggacgcctacgaaacctagacgagatgcgtgaccgtgcaaagctagtttcgcaaaccgttagcttccttgttgacctccgaacacaggaacagttgatagagaaacctaacaccactcactttattaacatttgaaagttaaacgtgacacagttcggtctctacaaacgttctcagttcgcattgttttttttgaattaatcatttttttttttgatcattaatgatcatttacgactccgtattcttgatttcttgggaaaagtttaaagggacgtcgttacggtggtcagttcgcgacttttctaacggacactttgttctcaggtcggatctcttcgttgaggttgcggacgaagaaaaagtgcgacggtttttttgtgacgctgtgccttacctcgaggaaccggacgcaggtgacttggtttacatc

SEQ ID NO: 315 - protein, 560 aa, Drosophila melanogaster
LPHLKNACYALEVPVKKQQLQNSRRPTVEWILPSAFAQQEVELLDSLKKRRFEAYVENVRIVPSAGRSAAKIEFQLQPQVFVEQLLQTKEIALHPSPFAAEHIVVEYSSPNIAKPFHVGHLRSTIIGNVLANLHEHLGYRTTRLNYLGDWGTQFGLLVLGVQLLNVSDKEMQLSPIETLYKSYVAANKAAEQRPEIAQQARDLFAALEGGTDKSMAKKWQQYRNYTIEDLSKVYNRLGVHFDSYEWESQYSQQQIQDVLDKLRSAGLLQPEHDGREIVVVDGRRIPVIKSNGSTLYLARDIAALLERLSRFQFSRLLYVVDNGQADHFNALFKTTAALDDRLSLEQLQHVKFGRIYGMSTRQGKAIFLKDVLDEARDIMREKRNISATTRENYNLDDEHVCDILGVSAVLVNVLKQRRQRDHEFSWQQALQVNGDTGIKLQYTHCRLHSLLDNFRDVDLDDIKPDWKHFSTEPADALDLLYALARFDQSVWQSKEQLEACVLVNYLFGLCNATSQALKRLPVKQESSLEKQLQRLLLFHAAKKTLRHGMELLGLRPLNQM

SEQ ID NO: 316 - DNA, 3334 bp, Drosophila melanogaster
gattcgctgcgtcgtttttccataaatttgcatatatgtattagttgggtggaatacatataaacagtgtgatttcgctctgtaaacaacaaccgcgaatccagaattccgtacatgcttatagtatagccgatcaaaaaaatcacactgagtggtgcgcctgaaaaacccgtgagtcatctcgtcgtggccgccgcagataatttcccatccgccgaacatcggggaagtacctaaaacgaatggtcagccatcggcggagctcgtttcgatcattagcgttccgatcggcgaaggcagcggatcacttttgagttgttaagacgcaattgatcagaaatattggattgatacggactatgaacatgaatcagtactacgacctggacaatgggaaaaatgtgatgtttatgaacgatgcatccagcaccagtggctatagcagcagtacatcacccaactccaccaaccgatccttttcaccagcccactccccgaaaaccatggaactgcaaacggacttcgccaatcttaatttgcccggcggcaattcaccacaccagccgccaatggcaaactcaccataccagaatcagctgttgaacaacggcggaatttgccaattgggtgctaccaatttaataaactccactggcgttagtttcggcgttgctaatgtcaccagttttggcaacatgtacatggatcaccagtactttgtgcccgctccggccactgtgccaccgtcccaaaactttggataccatcaaaatggcctggcatctgacggcgatatcaaacacgtgccgcagctgcggatcgttgagcaaccggtggagaagttccgctttcggtacaagagcgagatgcatggaacacatggatcgctaaatggcgccaattcgaagcggacgcccaaaaccttcccggaggttacactgtgcaactacgatggacccgccgtcatccggtgcagtttgttccaaactaacttggacagcccacattcccatcagctggtcgtgcgcaaggacgatcgggatgtgtgcgatccgcatgatttgcacgtgtccaaggagcgcggctatgtggcgcaatttatcaacatgggcatcatacacaccgccaagaagtacatattcgaggaactgtgcaagaagaagcaggatcgcctggtctttcagatgaaccgccgcgagttgtcccacaaacagctacaggaactgcatcaggagacagagcgtgaggccaaggacatgaacttgaaccaggtgcggctctgctttgaggcctttaaaattgaggacaacggcgcatgggttccacttgctccgcctgtatacagcaatgcaatcaataaccgcaagtcggcacaaactggagagcttcgcatcgtccgcctgagcaaacccactggcggggtgatgggcaacgatgagcttattctactggtggaaaaggtcagcaagaagaacattaaagtgaggttcttcgaggaggatgaggacggggaaaccgtgtgggaggcatacgcaaagttccgcgaatcggatgtacaccaccaatatgccattgtgtgccagacgcctccgtacaaagataaggacgtggaccgcgaggtcaacgtgtacatcgagctcattcgtccctccgacgatgagcgctcattcccggcgctgcccttccgctacaagccacggagcgtaattgtgtcgaggaaacgccgacgaaccgggtcctctgccaatagcagcagttcgggaacagaaagctctaataactcgctggatctgcccaaaacgctgggcttggcgcagccaccaaatggcttgccaaacctttcacagcatgatcagactataagtgaggagttcggacgcgaaaagcatctaaatgaatttattgcttccgaagatttccgcaaacttatcgagcacaactcttctgatctcgagaagatctgccagttagacatgggagagttgcagcacgatggtcataaccgggcggaagtgccatcgcatcgaaatcgtacaattaaatgcttggatgacttattcgaaatttacaaacaggaccgcatatcgccaataaaaatctcgcaccacaaagtggagaagtggtttatcgagcatgctctgaataactacaatagagacacgctcctgcacgaagtgatcagccacaaaaaggacaaactgaagctggccatccagacgatacaggtgatgaactacttcaatctgaaagatgtggtcaatagcactttgaatgcggacggtgatagtgccctgcatgtggcgtgccagcaagaccgagcgcactacatacgacctttgctgggtatgggatgcaatccaaatctgaagaataatgccggaaataccccactgcatgtggccgtcaaggaggagcacttaagctgcgtggaaagcttccttaatggagtgccaaccgtacaattggacctctcgctaacgaacgacgatggtctgacgcctttgcacatggccattcgacagaacaagtacgatgtggccaagaaactgatcagctatgatcggacctcgattagcgtggccaacacaatggatggtaataatgcactccacatggccgttctggagcaaagtgtggagctattggtgctcattctggatgcccaaaatgaaaaccttaccgacatcctgcaggcacaaaatgcagccggccatactcccttggaattggccgaacgcaaggcaaatgaccgggtggtccagctgctgaagaatgtgtatccggagaagggagaactggccatgacctggattccatgtaaggtcaaggaggagatcgattcatcgtcggacgaaagtagcgatgctggtcagctggagatcaagtccgaggagatggacatcgaaacaaaggacgaggattccgtggagttggacctaagtagtggtccaagaagacagaaagatgaatccagtagagacaccgaaatggacaacaacaaattgcagttgctgctcaaaaacaaattcatttacgaccggctctgttcgctgctgaatcagcctttgggacatgggtccgatccccaagatcggaaatggatgcaactagcccgccagacgcatctgaagcagttcgcctttatatggctgggcgcggaggatctgttggatcacgtgaaaagaaaaggagcctctgtagagttttccacatttgctcgtgccctgcaggcagtggatccacaggcttacgccctactggttaacccaacttgattatgtattgaatgttgatcaataaagtaccttagttttacaaaaaaaaaaaaaaaaaa

SEQ ID NO: 317 - protein, 971 aa, Drosophila melanogaster
MNMNQYYDLDNGKNVMFMNDASSTSGYSSSTSPNSTNRSFSPAHSPKTMELQTDFANLNLPGGNSPHQPPMANSPYQNQLLNNGGICQLGATNLINSTGVSFGVANVTSFGNMYMDHQYFVPAPATVPPSQNFGYHQNGLASDGDIKHVPQLRIVEQPVEKFRFRYKSEMHGTHGSLNGANSKRTPKTFPEVTLCNYDGPAVIRCSLFQTNLDSPHSHQLVVRKDDRDVCDPHDLHVSKERGYVAQFINMGIIHTAKKYIFEELCKKKQDRLVFQMNRRELSHKQLQELHQETEREAKDMNLNQVRLCFEAFKIEDNGAWVPLAPPVYSNAINNRKSAQTGELRIVRLSKPTGGVMGNDELILLVEKVSKKNIKVRFFEEDEDGETVWEAYAKFRESDVHHQYAIVCQTPPYKDKDVDREVNVYIELIRPSDDERSFPALPFRYKPRSVIVSRKRRRTGSSANSSSSGTESSNNSLDLPKTLGLAQPPNGLPNLSQHDQTISEEFGREKHLNEFIASEDFRKLIEHNSSDLEKICQLDMGELQHDGHNRAEVPSHRNRTIKCLDDLFEIYKQDRISPIKISHHKVEKWFIEHALNNYNRDTLLHEVISHKKDKLKLAIQTIQVMNYFNLKDVVNSTLNADGDSALHVACQQDRAHYIRPLLGMGCNPNLKNNAGNTPLHVAVKEEHLSCVESFLNGVPTVQLDLSLTNDDGLTPLHMAIRQNKYDVAKKLISYDRTSISVANTMDGNNALHMAVLEQSVELLVLILDAQNENLTDILQAQNAAGHTPLELAERKANDRVVQLLKNVYPEKGELAMTWIPCKVKEEIDSSSDESSDAGQLEIKSEEMDIETKDEDSVELDLSSGPRRQKDESSRDTEMDNNKLQLLLKNKFIYDRLCSLLNQPLGHGSDPQDRKWMQLARQTHLKQFAFIWLGAEDLLDHVKRKGASVEFSTFARALQAVDPQAYALLVNPT

SEQ ID NO: 318 - DNA, 1103 bp, Drosophila melanogaster
cccgcggaccactttaccctcctcaggcacaggttgatgtgccgcctactggacgcacaccaccggatgttaggcgtgttctagttcaagcagtgcccggagttctagttgtccttaaggttccctctcctcctcgacacccggaactcgtcggtcggctttgagaaacaaccgccgctgaacgggcgcttgctccagttcaaggtttattaaccgacggcttggcgactggacgaacggttgtgcggcacatgtcacccgcggcgtctttggtgcgggtggttgcaaattaattttgaatcaaaattgttcaaactttgacgcagttagctaatgagactaaatttaacgaccgacatcttccgaccgacaataccgcgttgaaactagatagctatttaacgactgacacaaatcgactcatcataccgtaaactaaacgactgacacctatcgaaacacgataccgtgcacgaatcccgaaccagtgtgaattcaatcggttaatcttttcatttgttacagattgaccttcggcagtccgatgcttaatgattaatcttttagaggttgatctgtacttatccttttggagattgatctaaacttatccatttggaggatagctatcatcggccatttatagctatagcttaatggcccactggtagccgaattcaaggtcgagatacaaatgcacatcttgaaataaaagccaaatcaaaacaaatggttatttaaagcaatcgatactgtttagatgttgcgaccgataaaatgcgtagcgagaaacgctaagggatagagaggcaacaaaacccttgtcacgtttgcggtgattgatggttcataaaggacgtgtaagtcgaaaatggtgaaaacgaggagcactaaaaacctcactcaaaaacctatacttagttacgtctattgtggagaataactgatgatgatatataatgggtgtctatataaggcaaacctgacaagatatatcttgagactgaaaattgctaacagggctccggcggttcctcgacgtcctactttaagtcctccgagcgttcctaaactatcggttccctaaagccaaagctctaatc

SEQ ID NO: 319 - protein, 117 aa, Drosophila melanogaster
GRLVKWEESVSNYTADDLRVVAYNPHKIKFVTGLKINRNSKGEEELWALSSQPKLFVGGDLPANEVKFQIIGCRTADLLANTPTLTFNDCPEAAKELQDEIQEARKDLIAKGFRFRD

SEQ ID NO: 320 - DNA, 2423 bp, Drosophila melanogaster
aaataaatcaaccggctttcgagaggcagaacaaaaaggagatttgtgaagtattctcaaaatgactgcattcgaagagtttggcgtgcttccggagctgggaatggccacagacgaattggactggaccctgcccaccgatgtccaggctgaggccattcctctgatcctgggtggcggcgatgtgctgatggccgccgaaactggttccggaaaaacgggtgccttctgcctccccattctgcaaatcgtgtgggagaccttgcgtgatctggaggaggggaaggctgggcaagggcggtgcaattggaggagctgtgactccgtgaccatgtccttcttcgaccgaggaaacgcgcttgccgtcactcctgatggtctgcgttgccagtcgcgggagttcaaggagtggcacgggtgtcgggccaccactggcgttcgcggaaagggcaagttctactttgaggccacggtaacggacgagggactgtgtcgtgtgggctggtctacacagcaggcaaacctcgatttgggcacctgtcgcatgggctttggattcggcggcaccggcaagaagtccaacaaccgccagtttgatgactacggtgaggcattcggcaaggcagatgtcatcggctgcctgctcgatttgaaaaaccaggaagtgagcttcaccaagaatggccagaaccttggcgtagccttccgctcgccggacaaccttgccaaggagaccttttacccggcggtggtgctgaagaacgccgaaatgcagtttaactttggaaagactgacttcaagtatgccccgggtaacggtttcgttggcgcttgccaggctggacccgagcatagcaaggccaatccgataaccggtcccgacagctggagcaccgccaaaccggcgcctaacgcccctcaggccattatcatggagcccagcagagaattggccgagcaaacctacaaccagatcgagaagtttaaataccacctgagcaacccagaggttcgctccctgctgcttatcggtggagtgaggttggaagagcaaaaggcgcagctgatgcagggcactcacatagtggtgggcacgccggggcggctggaggagatgatcaacagtggactggtcctgctcacccattgcggcttttttgttctggatgaggctgacgcacttctgaagcagggttacaccgagctgattgaccgtctacacaaacaaattcccaagatcacatcggatggtcgccgtctgcagatggtcgtctgctcggccacgttgcatgcatttgaggtgaagaaaatggctgagcgcctgatgcacttccccacctggggtgatctgaagggggaggatgctgtccctgagacggttcaccacgtcgtctgtctagtcgacccgcagatggacaccacctggcagtcgctgcgccaacccattggcaccgacggcgtccacgaccgtgacaacgttcatccaggcaatcattcgaaggagacgttgtcgcaggcagtcaagctgctcaagggcgaatactgtgtgcacgctatagataaacacaatatggaccgagccattatcttctgccgcaccaagcaagactgtgataacttagaaagatttctgcgccagcgagacaaacattactcgtgcgtctgccttcatggtgaccgaaagccgcaggagcgtaaagaaaacctggaaatgtttaagcggcaacaagtcaagtttctgatttgcacggacgtggcggctcgaggtctagacattacggggctgccgtttatgataaatgtgacgctgcccgatgacaagaccaattacgttcatcgcatcggacgtgtgggcagggcggaacgcatggggttggccattagtttggtggcaacagtgccggagaaggtttggtaccacggcgagtggtgcaagtcgcgcggccgtagctgcaacaacacaaacttaaccgaagtccgaggatgctgcatctggtacaacgaaccaaacctactggccgaagttgaggaccacttgaacatcaccatccagcaggtggacaagaccatggatgtgccagttaatgacttcgacgggccggtcgtgtacggtcaaaagaatttaagaactggcagcggctacgaagaccacgtcgagcagctggagccaactgtacgcaaactgacggagctagagttgcaatcacaatctttattcttgaaacgtcttaaggtctaacgcggatctggagcgacatttgtttgctatgcaaggaaaggatgtggtgaattgagaagtgcaagaccaactcacgcggaaatacttttgcggaaatacttttgcggcacaaacacacaattttgtatatgtaggaaagtcggagctcaagctctgctattaaaaataaacatttaattaaact

SEQ ID NO: 321 - protein, 725 aa, Drosophila melanogaster
MTAFEEFGVLPELGMATDELDWTLPTDVQAEAIPLILGGGDVLMAAETGSGKTGAFCLPILQIVWETLRDLEEGKAGQGRCNWRSCDSVTMSFFDRGNALAVTPDGLRCQSREFKEWHGCRATTGVRGKGKFYFEATVTDEGLCRVGWSTQQANLDLGTCRMGFGFGGTGKKSNNRQFDDYGEAFGKADVIGCLLDLKNQEVSFTKNGQNLGVAFRSPDNLAKETFYPAVVLKNAEMQFNFGKTDFKYAPGNGFVGACQAGPEHSKANPITGPDSWSTAKPAPNAPQAIIMEPSRELAEQTYNQIEKFKYHLSNPEVRSLLLIGGVRLEEQKAQLMQGTHIVVGTPGRLEEMINSGLVLLTHCGFFVLDEADALLKQGYTELIDRLHKQIPKITSDGRRLQMVVCSATLHAFEVKKMAERLMHFPTWGDLKGEDAVPETVHHVVCLVDPQMDTTWQSLRQPIGTDGVHDRDNVHPGNHSKETLSQAVKLLKGEYCVHAIDKHNMDRAIIFCRTKQDCDNLERFLRQRDKHYSCVCLHGDRKPQERKENLEMFKRQQVKFLICTDVAARGLDITGLPFMINVTLPDDKTNYVHRIGRVGRAERMGLAISLVATVPEKVWYHGEWCKSRGRSCNNTNLTEVRGCCIWYNEPNLLAEVEDHLNITIQQVDKTMDVPVNDFDGPVVYGQKNLRTGSGYEDHVEQLEPTVRKLTELELQSQSLFLKRLKV

SEQ ID NO: 322 - DNA, 4537 bp, Drosophila melanogaster
tacatgataggtcacccgaccgggttcgcccacccggaccgcgacgggccgctctcgcggtcgtaggccgtgtagacgacgctgcgccacttttatgaacaccggcggcacccgctgctgaaagacccgtagaccatgcgcttaggtgagtaagggtaacgaataaaggccgcctgcctcctgagggaagcggtcatgccccggttggtcgactagcaccaccttcggcctgagagccgtcgaacgggacgaatggcgcaggccgagggacaacaacatggttgacctgaagcttcggttgccgtacccttaggacgtcgtctatctaggcgggcggcgctcggagtttgcgctgaggcggctcgacaaatagttccttttgtatggggccgactcggaagcgcttgacacatcgcagtggaacccgaggcagtagtggtgacacacgacgtaatcggagtcgcttaatgagaaccggtgggtcaggacgcttgacgacgcagacgtcacctggcttgacctcgtgcgtctcttgctggatctcaacggtcgggatagaagttaattcgacgcgctgtaagggaagatgcaggtcgtcgtcggagtcgtcaggcgcgcgttacacggcgggaacttgtccctgagcatgcatcgaagagaccttatgagcggcaagtagccaccgacacgtcggcagaagtcactggctgctcggcggaaggactaacggttggtagattctaaactctggctagtgtacgtgccgaagacccacggcctacaactcctacgctcacagacgtcacagttagtgtttaaagctgacaaccgtataccagttctctcgagccgccacttccacatgcgttaactactacggtggccccctgatctcaaaagagtagctgaataggagtgccttttgtatgagggtctgtcggacccaagtcatttgctcgatttcacctcgggactgccgacgcaggaacgacactcaacctgtttacctccgaacagggatacctcgtgtaagcctcgtaacaattacagatgagactcgaccctaaagccggaattgcatctaaaccaaacagttttaggtgagttctaggcagccgagcttaccagttggctcccaatagtcgaaaaatacgattttgacgtaggcctttttctgttttcattacacgaagtcgacgtcaaacacttctcgcgagactcatacttagggacgtactgctgatcaggcgtgtaggacgacgtcccactgctgacggacatggaattggtcccgttattagacctcgattgcatacggccttcggtaccttgcaaaggtagttcgccggacccgagactgcttctgtaaaggccactaccgctgacagacctcaattttgtttcgggcgtgtgtccgtcgtaagaatgcctctcattcataacctgtcacaacgtcgacggcgagttgatgcgccggtgtttgaccggttaggctatacgacgatagctagggctacctgaggtgaaccgccaccgaccagcgtgacctgaccgcgtgatgagggatcactgggccgcgaccttcgaaaaaccgttactcagcgtcctcttcctgaagcaacagagaccgccggatgacaccaccgtaccgaaacatcagtacccgacgataagcgaagatctggcgtgcctactcaacgcaacgataggccgtctaacgtttgagctgttggttatgcccgtgttcgacgtccaggctcgtggtcaataatcggacttgagtaaggctgtggtcaactaacatgagtgacggctaccttatcactcggacaagttatacagctttttgagtcgcatgcgggacctataacttacgcggatacttaacctgcacttctcgtaaacgtaggtaggacggacgtaacaatcagactgacactgattggagttcttactcgatttcggggtccctgtcgacccacctctagtccgtctctgatagtagcacttacatacgccggcgtataactactatgtcgcgctacggccgcttgtccatacaaactttttataattaacagctttacgaatttcaacctctctacgtttagtaaatatgtaaagtatacacttaaatggcaatagagtttcatttcgcttgcagtcgtacagaagataaacctttacagaaaccaatagctcggttggtattgttccttaaactcatacgtagaaaagttgaagcgcctgttaataatgctatatagtatatcgttgatttcagttttagatacaaatggtttatccagggtttgtggaacgaccggtggacggaccgatcgacgcaactccagaagaccgacagtgtgagggaccttgcgacacgctacgcactgacggaaaccgaaatgaggccacgggtgccttacgcgcataccgaaggttatgacggcggcccttccctcgcagcgcttccgctcgtcccgccgcgggttgcagacgtgtcaaaatacagtttcgcttagtacgactcgaaaggcgactttgaaataggcgagcagcacgagaaactgttacactagcaagacccccacctcttgctttcgtgcgaaatgcggttactcgtccagagggtgaagagagacggcaagcggcaataccttgcgttcagcgtctagatagacgtgttccatgaagcggttgactagttcgccttaaacccgatgagacggaccctttaccgtgtcagcacaacgagcgatggtataaaaggcgtgcgagaccttgacgaagatgtgctccaagagctccttctccgatgatcgtttgtcgggtagggcctacgtgtcgacgggtcataagacctgaaatattctctcaaagggcagatgaacctttgttaacaagttacacgggcgttttgtctctagcgggacaccggcatggataaaagctaccgaccatttggcttcctaaataaggtctacacagacgtcagcctcgtcgacctgtgccgacgctcgatgaactattaggacgtcttagatcttgggagacaacaatcgttcgttatacggtggtacgacgacctgtaacgagatgtcgtcgctttcaccctcgaccgattcctgaactaggccaaaaatttccgatatctaggtttactctagctgagtggcgccagcagctaccaccacttacacttttaacgaggaggaggggtccacttatgtgtcgtcgttcacttggtcttacgcctacggaaattgtaccaagacccagggtaacggtctctctcttcgaagaggtggtgccactgatcgttagacgggtttctattcgtccgtagaccctgaggaccccaacgtggacactggctttcgtcgtcacgtcctcgtgggagccaccacgcggccgccagctgattcgtcgctctctgcaagacgtagctagactatgacgtcgcggtacgagctgttgatgaagtcttggtgtttgattacctaaatccgatgtacacacgaatagacctgaaagtggaacagtcgaccgaaagcgtccttagtctcgcccgtcggttcaacctactaaagcggccgcgagacgtccgcgatgtgcttcttgatctagaggggtaaggtaaaggctgacgccgtttcctgctgaaacgagtctatgcgccgtcagaagctgtctgtcctccgccacctagaagcgtttgcagtctcagaccgataaaatcgaaccggtgcgggttacctcggcgttgtgtcagcggtgtcgacgtcggttcgtaatcccttctcctccttcttgacgtcgtcggatcgagggatggttatgaattctgcgccagacctagcgttgacagcaagctattgaaagcgatggcggccgacatgagcgatggctgtagtctcctgctggatcggcacctataagacggagtcttcgacaggtaattcgacgcaatgaacaatgtcgacaaatagctccgcttgacgtgcctgatgcgcgaccaagaaaggtaaaacgaggtcctgcgccgaaggtagagcgcctaacatttgccttattaggcttcgcttagccaagtgtggacagctgcatgccttagacgtgagtttgtcaattcagtctcgtggaaacttgtgtcgcctagaaacatggcccccaagcaggagtggaacgttggcgtacaaatggacgatcttgtcatgtatgtcagagaccccctacgagggacaagcgtcgaggttctacggccgggcccatggctcgtcccgcacctgcagtcgtgccctgaggtccctgacgtcttgcttcacccgcttaaacaaggtttaagggtcgtccgattgcctttggttacctgacaccgcctggaattgggcttagtggtcgccgagtgcgccgtgcggtcagatctcagattgcccttgcgtcaccaccggtcgccaaggagacgggtaagttgcgggtgggtcgcggttgacagtgccgtcttgtcggcgctcgccctcccgacagcggagta

SEQ ID NO: 323 - protein, 1421 aa, Drosophila melanogaster
MYYPVGWPKRVGLALPGESASIRHICCDAVKILVAAVGDDFLGIWYANPLIPIAYFRRTEDSLRQYGANQLIVLALLTASGSLLLYQLDFEANGMGILQQIDPPAASLKRDSAELFIKENIPRLSLRELCSVTLGSVITTVCCISLSELLLATQSCELLRLQWTELEHAENDLELPALSSIKLRDIPFYVQQQPQQSARNVPPLNRDSYVASLEYSPFIGGCAAVFSDRRAAFLIANHLRFETDHMHGFWVPDVEDASVCSVNHKFRLLAYGQESSAVKVYAIDDATGGLEFSHRLILTENILPDSLGSVNELKWSPDGCVLAVSWTNGGLSLWSTFGALLMSTLSWDFGLNVDLVCQNPLKIRRLEWSTEGYQLFMLKLHPEKDKSNVLQLQFVKSALSMNPCMTTSPHILLQGDDCLYLNQGNNLELTYAGSHGTFPSSGLGSDEDISGDGDCLELKQSPHTGSILTESKYWTVLQLPLNYAATNWPIRYAAIDPDGLHLAVAGRTGLAHYSLVTRRWKLFGNESQEKDFVVSGGLLWWHGFVVMGCYSLLDRTDELRCYPADCKLDNQYGHKLQVRAPVISLNSFRHQLIVLTADGIVSLFNMSKNSAYALDIECAYELDVKSICIHPACIVSLTVTNLKNELKPQGQLGGDQAETIIVNVCGRILMIQRDAGEQVPNTLLATCLASCVEVFWLSHSLERCAMRDCLWLYSGAHGMRVWLPILPPGRERREGEQGGAQRLHSFMSKRIMLSFPLKLYPLVVLFDNVIVLGVENESTLYANEQVSHFSLPFAVMERKSQIYLHKVLRQLIKRNLGYSAWEMAQSCCSLPYFPHALELLLHEVLEEEATSKQPIPDAQLPSILDFIREFPVYLETIVQCARKTEIALWPYLFSMAGKPKDLFQMCLQSEQLDTAASYLIILQNLEPSVVSKQYATMLLDIALQQRKWELAKDLIRFLKAIDPNEIDSPRSSMVVNVKIAPPPQVNTQQQVNQNADAFNMVLGPIARERSFSTTVTSNLPKDKQASGTPGVAPVTESSSAGAPSVVRRRSTKQRETFCIDLILQRHARQLLQNHKLMDLGYMCAYLDFHLVSWLSQESERAAKLDDFAGALQALHEELDLPIPFPTAAKDDFAQIRGSLRQTGGGGSSQTSESGYFSLATPNGAATQSPQLQPSIREEEEELQQPSSLPILKTRSGSQLSFDNFRYRRLYSLPTSEDDLAVDILPQKLSIKLRYLLQLFIEANCTDYALVLSILLQDAASISRIVNGIIRSESVHTCRRTESALKQLSQSTFEHSGSLYRGFVLTLQPHVYLLEQYIQSLGDAPCSQLQDAGPGTEQGVDVSTGLQGLQNEVGEFVPNSQQANGNQWTVADLNPNHQRLTRHASLESNGNAVVASGSSAHSTPTQRQLSRQNSREREGCRL

SEQ ID NO: 324 - DNA, 3184 bp, Drosophila melanogaster
agagtgaaataaatcgaagtaaattgcgtcgagcgctgcaaaataatggatcgcactttctacgagggctggctaattaagtcgccgcccaccaagcgcatttggcgagcacgctggaggcgtcgctacttcacgctgaagcagggcgagataccggagcagttctgcctcgaatactacaccgaccacaactgccgcaagctgaagggcgttatcgatttggatcagtgcgagcaggtggactgtggcctgcggctggagaatcgcaagcagaagtttcagtacatgttcgatatcaagacgcccaagcgcacctactacctggctgcagagacggaggcggatatgcgcgactgggtgaactgcatctgccaggtgtgtcacctacacgacacaaagcaatcgaatgagttgccattaggagctgtgggtgcagacgaaaaccgcacccaacacacgagctccagtggcggtctaagcaactccactcaaaatacgaccaccacatcgttgcactcgtcggccggaaccacagcgcctcaggcttcggtcccaaatgctggaggatctgcccagctgcgacgaccggcggtcattgaagagcaaccgatgccctcgaatgccggcaacaataactcagactcggtgtatgtcaacacggagtacagcaatcgcgagacgatgctctgcgatgccaatttcgatcagcaggaactgctctcggctgcccagcagcaaccgcctccatcgccggccacggctctttatctaaaccacagtgctttgatccaagctcaggcggcagctgcagccgccgagcaactgcaacagcagcagcaacaagctgctcgcttggcggtcagtgccaacggagtagtgcgcaagctgccggagcatctggtgctcacgcagcagaccctggcggaggcagctgcccagcaacacagcagcgtacaggcttcacccgctttgagcaccgcatccggaccgtacatacccatcagcgagtgcttctcgggcagcccgagattcctgcccggcgttccactgcccggcgcagatttggccataccaaacaaccccaccacgccgttgaacaacttggatcccaagttctacgatacgccgcgtagtcataataacataggtctaaatctgaccaacgatcaatcttactcaccgaagataaccaatttgagtctgcaacaattggccaataacaatgctagtaaacaacgctccgactccgattcggaaagcgttttcaccgatgacgatgagtgggctcatcctttgcccctgcgcgagaatgtggatcgcagcacccgaccttcggatagttccattgagaacgaatcattcgtgctaacgtactcgcagcgattctctaaaatgcccgaggaaggaggagcgatcgtgccaccagctgaaaagagttccaagctagcgggagcagcatctctggcagaggctggtgaccagggaacgctggataagctggccaaggtgctgaagaacaaaaataatctcatattggactttaaggagaatgaaaaaattcctcgcgatctgccgcagctgtcggatacggaaaatacttcaccggccattgtggcccgccgcaacgcgcactccgctttcatcgaggaaagctatgacattccaaggtcccaccagcagccttactacaacgtcaaccagctgctgggcgagcgaccagtcaccagcccgcacaattccaatcccattgcagcatccacaccgaatctcatggcggccgatctgggtgcagtggccgcaatttcagcggcagcgaatcccggcctgatgggtgaggcacaggcagtcgcatcatcgcccaccagtgcgcgcacattgcctcgacactgctacaccaatgcagctcccacaaagatggagggcaatgtttttcgatacgacttcatggagcaggcggactgcccgccggttaaccggaaacttaagccaaaggtggcgggtggattgccagttgtagaggacaaaccgccggaggagtttcctgcaaagcccccggtgggcgtagatcagttaaccaataaactgggtgcagcccaactgcagcagcccattggaccgcccagtgtggacaggaagtgcaaaccgaatgcctataagttgggcaattcggctaccatgtcgccggcaacgcgacgttcctccggtgcccctctctcaatggtgctgccgcatgaaacggatgtacactccccggcggcagccaacgccttctttcacgagacccgcaccctgcctcgccaacagcatcggcatcatccgaacagtcccggcagcatgtcggtacaacatcagcgcaccgcctccgcagcggctgccatgatgagcttgacggcagcagctgctcctaagcagcaagcagcggcacagactgagcacaagctgcagtactttgatctggatgtgaccaacaaaccgccgttgctaaatcgatccagcatgagtgtggggaatctgtactcacaaggcggaaatggagctagtggaatgcgattcgcaggcgtcgaagctggcggagctcgagcgccagtgcctagcagcgtggtctatagatccgtggactttgtcaagacggaggcatttaagaggattcgagaggagcgcgagagcagcggcaacaagtgaaactgctggttcagctgaatgaaatcatatctccagtacatttacttgtcaacgtgcaatagcaaaggaaggaccatgttgctgatccgagattttcgtagtgcctattggtggtcagctgaggagagctgaccccatccaaaaacagtgcaaatttcgagtggcttttacattccgttaacatcgtcaaattcattattcattaaaccacatatctagcttgtaggacggcaccagcatttctgtgtgctgttttaaatctgtaatctgtaacccgtatctgaatctatgtcgtattcgtatttaaatcgtgcttccaacacttccatgtttattgttaagcttcggaatcaaaatgtaaccatgacaaacgatcttagtgctaattttacaatgcaaacaattattttatatacgcaagcgaaatatttatatacacgaattttatatggtaacaaattatttacaatttattaatgtaactcgtgtgcgacacaagctg

SEQ ID NO: 325 - protein, 878 aa, Drosophila melanogaster
MDRTFYEGWLIKSPPTKRIWRARWRRRYFTLKQGEIPEQFCLEYYTDHNCRKLKGVIDLDQCEQVDCGLRLENRKQKFQYMFDIKTPKRTYYLAAETEADMRDWVNCICQVCHLHDTKQSNELPLGAVGADENRTQHTSSSGGLSNSTQNTTTTSLHSSAGTTAPQASVPNAGGSAQLRRPAVIEEQPMPSNAGNNNSDSVYVNTEYSNRETMLCDANFDQQELLSAAQQQPPPSPATALYLNHSALIQAQAAAAAAEQLQQQQQQAARLAVSANGVVRKLPEHLVLTQQTLAEAAAQQHSSVQASPALSTASGPYIPISECFSGSPRFLPGVPLPGADLAIPNNPTTPLNNLDPKFYDTPRSHNNIGLNLTNDQSYSPKITNLSLQQLANNNASKQRSDSDSESVFTDDDEWAHPLPLRENVDRSTRPSDSSIENESFVLTYSQRFSKMPEEGGAIVPPAEKSSKLAGAASLAEAGDQGTLDKLAKVLKNKNNLILDFKENEKIPRDLPQLSDTENTSPAIVARRNAHSAFIEESYDIPRSHQQPYYNVNQLLGERPVTSPHNSNPIAASTPNLMAADLGAVAAISAAANPGLMGEAQAVASSPTSARTLPRHCYTNAAPTKMEGNVFRYDFMEQADCPPVNRKLKPKVAGGLPVVEDKPPEEFPAKPPVGVDQLTNKLGAAQLQQPIGPPSVDRKCKPNAYKLGNSATMSPATRRSSGAPLSMVLPHETDVHSPAAANAFFHETRTLPRQQHRHHPNSPGSMSVQHQRTASAAAAMMSLTAAAAPKQQAAAQTEHKLQYFDLDVTNKPPLLNRSSMSVGNLYSQGGNGASGMRFAGVEAGGARAPVPSSVVYRSVDFVKTEAFKRIREERESSGNK

SEQ ID NO: 326 - DNA, 1502 bp, Drosophila melanogaster
atggccggcttcgtcgcggtgcacacgggtacgtatcttggccatggcggttccgatccgccgggcagacagccagatgattgatgaccgccacttgctctcaggggctgggaactgcatcgacgagacgaagtaccagcgggtgattaaggaggcctgcctgcgcgccacggagatccttcgcaacggcggatccgccgtcgatgcctgcgaggcggccattgtgcggctggagaactgcggctacacaaacgccggctatggctccaatctctgcatggacggctctgtgcagtgcgatgcggctataatggatggctcaacgcttaactttggcgcctgcacgaacgttagtcgggtgaagaaccccatacagttggcgagacgcatctgcgatgcccagtccagtccgcagcttctggagcgcattccaccgatgatcctcgccggcactggagcggaacactatgccgacgaggtgggttgctccatggtggagcccggcgtactgatctcatctaaggccaagttccagtttaatcactacaaaagcaagtacgacctcgtggtcaacagcagattgggcaaggcaacgtccgaggaatccgtacaagtgccggaaccaggaaacgaggtggaacttgccgctgctttggacacagtgggagcggtatgtgttgatggggcagggaacacagcagctggatgtagctccggtggcatactgctcaaagttccgggcagagtggggcaggcggctacttatggtgccggctgttgggccaccgatacggacgaactggccatagccacctgcacaaccggaaacggcgagtacctgatgaaaacgctgctggcccgagagatctgccatggggcatttagcagtgattgtgcggtgaccagtcttcacaagacgttcaagcaaaagttcctggactccccgctgctgccccgacagcaggatctgtacgctggagctctgacgctactctattatccgggccagagcagcggcgaggtgatgtggagccacacgacgcagtcgttctgtgtcggctacatggcaaccaaccagagggtgccaaaggttcgtacacccatccatcattttctgatttcacatataactaattcggcgtatgtgtttatatttgcagtttgtgcattcgccgctgcccacgtacagcgtcccgggccgatcgtgcgtcgtcaatggccataatttccatttgcgcatttaaatgtgggctggccaactagccgcagcccccagcaccttcctgcagctcctagtcccgctgctctgcatctgcaattcatttgatttaatgtttaattgccgcgacaatcgctgccaatgacatatgggagcagaaggcgcctgaggagctgggacagcattatgtgtatatgcttcattctctcggcgaaatattaagataattaagcaaatatttttattgtaaaaatctcgtagatcgtaatgtttgcagtactag

SEQ ID NO: 327 - protein, 339 aa, Drosophila melanogaster
MAGFVAVHTGAGNCIDETKYQRVIKEACLRATEILRNGGSAVDACEAAIVRLENCGYTNAGYGSNLCMDGSVQCDAAIMDGSTLNFGACTNVSRVKNPIQLARRICDAQSSPQLLERIPPMILAGTGAEHYADEVGCSMVEPGVLISSKAKFQFNHYKSKYDLVVNSRLGKATSEESVQVPEPGNEVELAAALDTVGAVCVDGAGNTAAGCSSGGILLKVPGRVGQAATYGAGCWATDTDELAIATCTTGNGEYLMKTLLAREICHGAFSSDCAVTSLHKTFKQKFLDSPLLPRQQDLYAGALTLLYYPGQSSGEVMWSHTTQSFCVGYMATNQRVPKY

SEQ ID NO: 328 - DNA, 625 bp, Drosophila melanogaster
gtagcaagaacaagaaaacatgttgagcatcacggcccgtaacctggcaagcgccctccgcagcagcctcgtcggcacatcgtcgcgcgtggccgccgtgcgctgtctgcacggaaccgaggaatcggcggaggagttcgacaagcgctacgagaagtacttcagccgtgagggcatcgatggctgggagatccgcaagggcatgaacgatctgctgggcatggatctggtgcccaaccccaagatcatcgaggccggtctgcgtgccagccgtcgcgtcaacgacattgcactggccatcaggtggctggagggatgcaaggacaagtgcggcgaccaaaaggccaccctctatccctacttgctggagaagatcacccccacactgcaggagctgggcatcccaaccatcgaggaactgggctacgacaagcccgaattggccctgaagtccgtgtacgatgcctaagcggaaaacactagtttaaaaacacagaacacaatatacacgttacagcgacactagctacctactatccaatgtatggtgcggatgaacatgttgttggattgctaataaatggagattgcagtaaggctaccacaccagcaaaaaaaaaaaaaa

SEQ ID NO: 329 - protein, 149 aa, Drosophila melanogaster
MLSITARNLASALRSSLVGTSSRVAAVRCLHGTEESAEEFDKRYEKYFSREGIDGWEIRKGMNDLLGMDLVPNPKIIEAGLRASRRVNDIALAIRWLEGCKDKCGDQKATLYPYLLEKITPTLQELGIPTIEELGYDKPELALKSVYDA

SEQ ID NO: 330 - DNA, 788 bp, Drosophila melanogaster
tctagaggcgcaacgcagctttgtgtttcgtttttcgttcaattctaagcaggaggattatatattgaataaaacccaattctgtgcgaagaacaaaagaaatacgcgagacaccaacaccagcacacaaccaaccaaacacacacaaccaaccaaacacacacacaacccagaaaatcaaatttcaatcagaaaatggcgttaaaaagaatcaataaggaactgcaagatctgggcagagatccacctgcacaatgttcagccggtccagttggagatgatttatttcactggcaagctacaataatgggcccgccggacagcccttatcaaggaggtgtattcttcttaactatacattttccaacagactatccctttaaaccacccaaagtggcttttacaacgcgcatataccatccaaacatcaacagcaatggatcgatttgtctcgatatattaagatctcagtggtcgccagcattaactatttcaaaagttttattatcaatttgctctctactctgtgatcccaatccagacgatcctcttgttccagagattgccagaatatataaaaccgatcgggaaaaatacaatgagctggcacgagagtggactagaaagtatgctatgtgatgcgttccagattgcagcagtccaacagaatcagcaaattcaacatcaacaatagcagaagtaaaagcagatgcaacaacaacagtaaaagcaacaaagataacatcaacagtttacaatagtcagattcagaagaggaggagctgcag

SEQ ID NO: 331 - protein, 147 aa, Drosophila melanogaster
MALKRINKELQDLGRDPPAQCSAGPVGDDLFHWQATIMGPPDSPYQGGVFFLTIHFPTDYPFKPPKVAFTTRIYHPNINSNGSICLDILRSQWSPALTISKVLLSICSLLCDPNPDDPLVPEIARIYKTDREKYNELAREWTRKYAM

SEQ ID NO: 332 - DNA, 3071 bp, Drosophila melanogaster
aaacgcggaaaacgaacgcggacgaacggcgagaaaagcgaggaaaaacgggtgcagagacagagactgattgggaaatatgtgcgcctgagttttcccggccagaaggcaaagtgccaaatgctctgacaaataattcctgtaataatcagcgcgattgaaatcaacgcgacgctcgtaaaattgcaaatgcagcgcaaaaagtgaacagcagtgcagcggaaattaaatcgttttagcgagtgccaaacgggaaatagaaaatcggcagagtagccgaactgcagttaaaactatctcttcctcttattgcgactaaacaaccggcggattaatcgaatccgaaagatggcccccaacttgctaacaatcggattacttttgaccctgatcgccagcggtcaggcccatctcaatattttcctcaacttgcacgaggtgctgcgcctaatcggagtctcggcggagctttactacgtgcgggagggcgccattaacgactacgccttgaacttcgccgtgcccgtgccggcgaacatcagtgacgtgacctttacgtggcaatccctggtggaccatccgctgccctacagcatcaatatcgccacatcggacacggaggtgttgccgcgacccattctgaacatatcccggatcggggatgtgcccgtggagccacagacatggggcattgcgctcaagtgctcgggcaccaggaatgccgaggttacggtcaccataaatgtggaggtcattctggatcgggctaccaataacaatacgaatctgatcttcaaaaggaagaagatctgtttgagggaggaacaggacagtgcgcacgaggagtacgacgacgatgacttggacttgctgcaaacggcgcgtaagggacatggcggagatattcactatgtggatcgaaacgatgagcatgtggtcgccaatggacaccaggcgccggagaagcaacgtccggttgtcacagagtcgccagtgggccgtggaaactccggtggatcgaagcgcgactttgacccgatgctgagggagaacctggtgccaccggccagtggcctggttaccctaattgtgggtggcattctggctctggtccttgtttccaccctcatcctgatagcctactgtgccaagggcccgtccaagcgacatccttcgaacggagtgcatctcatcaaaacctctagcttccagagactgcccaccatatcgtcgacggcccacaactcgatctacgtctgcccatcgaccatcactcctacatatgccacgctgacgcggccctttcgcgaatatgagcatgagcctgaggagttcaaccgccgtctccaagagctgacagtccaaaagtgccgcgtccggctctcctgcctcgtccaggagggaaactttgggcgaatctatcgcggcacttataacgactgccaggaggtattggtcaagactgtggctcagcacgccagccagctgcaagtgaatctgctgctccaggagtccatgatgctgtacgaggcctcgcatccgaatgtcctctccgttctgggcatctccatcgaggactatgccacgccctttgtgctctatgccgccaccggaagtgtgaggaacctgaagagcttcctgcaggatccgtcgtacgccaggagcgtcaccaccattcagacggtgcttatgggctcacaactggccatggccatggagcatctgcacaaccacggcgtcatccacaaggacattgcggccagaaactgtgttattgatgatcagcttcgagttaagctcactgatagtgctttgagtcgcgatctcttcccgggtgactacaattctctgggcgatggcgagtaccgacccatcaagtggctgtccttggaggccctgcagaagtcccattacaacgagggcagtgatgtttggtccttcggcgttctcatgtgggaaatgtgcactctgggtaaactgccctacgccgagatcgatccctatgagatggagcactatctcaaggatggatacagattggcccagccattcaactgccccgatgagctcttcaccattatggcctattgttgggcctccatgccagctgagcgaccttcgttcagccagctgcagatctgcctatcggagttccatacccagattaccagatatgtttaaccagcggtgctgaagcatgccaagacctgtaaatataacaagaggcgacgtcgcaagattttccaacagaccacgtcgtccactctgttcccaaagacatattaaatggtagcgcctaaaaactggggttcgtagcagctccccaggcataaatgtacgaacgacttatgagaagatgtggagggcggacggtgaacggtgaagcggcctgaaaacgtctatccacataactcctagttatatatttagtcagtaaggacatgtgacatttcaatgcaagaattaggattatctgaaaaacataaacacaccctatgaactcccctgttaagaaaaacacaaatgttctctcaaaaaaaaaaaaaaaaaaaaaaaattaagagccaaggcccagtaaaattgatactaagagaatccttgaaaaaatccacaatgaattaaaataaatagcaaatattgatatacaaatcgtagctaaaacagatccattaaatcagaaccccacgaaaaaccagtgctaggataggacccaaaaaatatgtcgtagtttaacagagagcgttgcaagtttgccattataatgggataccaatacgataccgatacatatatctatgtatggacatgtattcaagtgtgtgtttatgtctaagaaccgtagtgctagtaagactcgaaatatttatctaatgttagtgcacatacgaccccaaaatccttaaccctaagttaccgcctccttgtacgcgtagtgcagtctcgagttgtaagtttttgtgtaatatacttaagcagtttgcattagttcttaagttactcttatggttttctatggcagagacacaaaagaaaacgatttcaataaacgtccgtgcataatatttaaaaac

SEQ ID NO: 333 - protein, 610 aa, Drosophila melanogaster
MAPNLLTIGLLLTLIASGQAHLNIFLNLHEVLRLIGVSAELYYVREGAINDYALNFAVPVPANISDVTFTWQSLVDHPLPYSINIATSDTEVLPRPILNISRIGDVPVEPQTWGIALKCSGTRNAEVTVTINVEVILDRATNNNTNLIFKRKKICLREEQDSAHEEYDDDDLDLLQTARKGHGGDIHYVDRNDEHVVANGHQAPEKQRPVVTESPVGRGNSGGSKRDFDPMLRENLVPPASGLVTLIVGGILALVLVSTLILIAYCAKGPSKRHPSNGVHLIKTSSFQRLPTISSTAHNSIYVCPSTITPTYATLTRPFREYEHEPEEFNRRLQELTVQKCRVRLSCLVQEGNFGRIYRGTYNDCQEVLVKTVAQHASQLQVNLLLQESMMLYEASHPNVLSVLGISIEDYATPFVLYAATGSVRNLKSFLQDPSYARSVTTIQTVLMGSQLAMAMEHLHNHGVIHKDIAARNCVIDDQLRVKLTDSALSRDLFPGDYNSLGDGEYRPIKWLSLEALQKSHYNEGSDVWSFGVLMWEMCTLGKLPYAEIDPYEMEHYLKDGYRLAQPFNCPDELFTIMAYCWASMPAERPSFSQLQICLSEFHTQITRYV

SEQ ID NO: 334 - DNA, 300 bp, Drosophila melanogaster
ctacgcaatgccatcaaatgtcctggctactcggacatctatggtcagtacaataaggactcgtccttcgagaagtgcgatgaatggagcaacaagctgcaattcccagccgccggagaaatggataaacaggaaccgatccagagtcgcacgcacaaggtctacgacagcatgaagagttttctgcagcgcaaactcttcgcgcaaccctcgcataaagagcagatcttaaacgaagaacccacaagcgactatgatgaggtgtgtattgtttatggtgcatttatattaagaactggt

SEQ ID NO: 335 - protein, 143 aa, Drosophila melanogaster
LRNAIKCPGYSDIYGQYNKDSSFEKCDEWSNKLQFPAAGEMDKQEPIQSRTHKVYDSMKSFLQRKLFAQPSHKEQILNEEPTSDYDEDLLDSSYHADAEEEEEERDADCSCSSTGSSSTSSKQPNHAETITPKVPAVPQLLAE

SEQ ID NO: 336 - DNA, 79 bp, Drosophila melanogaster
agcgtcagcggcagcgacggcgtcaagctcaacctcaacgttgttggcgttggcgcttcctcgcacctactcttcctcg

SEQ ID NO: 337 - protein, 26 aa, Drosophila melanogaster
SQSPSLPQFELELQQPQPRRSVDEKE

SEQ ID NO: 338 - DNA, 2554 bp, Drosophila melanogaster
gcctcgtctgcgcccaggccgtggatgcggaggccaagagcagccaagccaagccagcggaagacagcaagagctccgcctccacgccactggaatcggaggcgaccaaagacaagcgacaagtgagctccaaggagacgtctctgtaccccaaccaccgcagctcggcggcatcgtcaagcgccaacgatgatcccgaggatggtcaggaaaccatctacggctccaagccgaatcagttcatcattcgccccattgcaccgcaccagcatcagcagcacgaatcgcaccaggagccgcagttgaggaactttgcggcggccaattctcgaccccatgccgcccaacttctcgagcagagtcaggaggtgagtttgggaatttgtccactttatgcatccaaggttttctcctttctgcattgcatagtttttgattgtctaggataagttataggttatactacttatgtattagctatctgcagcaactgcaggacttgttttccaagttgacccataaaactgccagccgtaatccctgggtgttcaatagagggagtgggtgatctactgatcgactggccaactgacggattaccattgccatgaggaattgtttgttttgtgccaatcggggggcgttccatcgacatcgcggctcttgtctggcgttttgacttggccccccggccatcagaggtcggacattggacatcggacgacctgggcgatcgtgacttagcatcggcggcaggcacacgattctttgcaaaatgccggatgtaaacatctcggcgcccaaaacgaccaacataaaaggcagaaagccaaatggcccaatcccagacggattttgtcaaatttttccctttcgccgaggccaagaaaccttgaccaatatctcggcttatattcggaacgaatttgcaattgatggtagacaaaggcgattgcaattagccaaagacaatgttttggttgcaaaacgtatagaaattaaaagtgccggcaaaagttgtaataatcataataataatgatatttttttattataaatgcagttggcaaaactaagtcacgacatgacggcgacggcgacagcaacaaatgcataattgcaaaattattatttgtcttattacgcgtcaacacaataatttccacctcctgccatccaacttgagtttccacccatccaacggattcgcttggcaatggcttctccaattccccccccccccccgccccgcctcgccttgtcttcagtgggtcttgtaatagtgcaagacatcggagaccgtggaaaaacaatggcgcttgtcgtgggaagaaagttgacataatgttataatcaccccacttttggtctgtcagctttgtgtcgcttcatggcgccttgactcgccggcggctttatttgccataataatgtgtatagtagtcgatggcacactgtgcaacaggtttccagaagaatttaggagctttctgtatttttatggaattttatagtaagctgcttaaaactgctaaaaaaaaaggaccaaattcaagagtgtataatttacatacatgacgaataagatagcttaaattcaatcaataattcgtttttaatttaaagaagagcaaaggaattgattcgttttattttcaactttttattataaatctaaatatttatggcatatttgtataagttttttatgggaaacccccacacacaaccttgttgcacagtgttgtgtttgttgttgctgttgcaacatcgaagagtccgcttctttgtggttgttgtgtttggcgttggcgttgccaaagtttgccacaagtgttatataaactcatttttttagatgccacgccattctcacagcgtttgctgctctgctgaagcacctgcaaccagttgttgccgctgcggttttttcgctcggttttttatgtttaagtcatgatggtgatggtgttggtcatgcggctccactttaaacggctgctgacattggccgccggcagttcacacacccaccataattatgcgcccccactcactttttcccttgccatctatctgtatccgtatctcgaaaggtgcagcactacgtgtatctgcaagatataatgcgccatcatcagcccaaggccctgctggccgcaggtcaaggcaagggtgcggccagtgcgcccaagaagtcatccactccggtggccgaggaggagcaggagcaggaacaggaggcggaacagcgatacgcggtgtccattcagccgcagccgcagcaacagctccagctccagcaaccacgtccacgtcagtaccagggtccctatcaactgccattgccgctgcctgctccacagcatcgatcggtgaatccccagcagcagcagcagcaacatcagcaggtgggtcatctaaatgcgacgctataaagctcttatactaatcaatcctactttccaaaagccctaccaagtgattcccgaagagcagtttcttaagatcctggaggaggagctgcaggctagagcctatcatgagcaacttc

SEQ ID NO: 339 - protein, 254 aa, Drosophila melanogaster
LVCAQAVDAEAKSSQAKPAEDSKSSASTPLESEATKDKRQVSSKETSLYPNHRSSAASSSANDDPEDGQETIYGSKPNQFIIRPIAPHQHQQHESHQEPQLRNFAAANSRPHAAQLLEQSQEVQHYVYLQDIMRHHQPKALLAAGQGKGAASAPKKSSTPVAEEEQEQEQEAEQRYAVSIQPQPQQQLQLQQPRPRQYQGPYQLPLPLPAPQHRSVNPQQQQQQHQQPYQVIPEEQFLKILEEELQARAYHEQL

SEQ ID NO: 340 - DNA, 2745 bp, Drosophila melanogaster
taccggttgtcttttaggctccttgactttgaccggttggccgttgttaccccgcaaccgtgtcaccttagtttcgcaatgtaaaactctttaatgtcataatgattagtttagaaggataagtgaatatattacattttttctaatttttttgaatagattatttatatttttaacatgtctaaacacgactggtaagtacaaacaaatatacatttatgttttacttaacgtaaaaataatcaccaaactttaagtttgaaaattatataattctaatcccacatcttatttttccttttaattgaaaatatttaactattttatctaaacctaaatgttcggtatttttacaatataccacaaaccgacagaatcaaaagtcagagaaatcactatattttatagagagagaattaacaattgattacagtttgataaagagtatgtataactgagctgaatccgtcgacttttcattcaaagattcacatttttttttttactttaccaaagatcgaaagtatgacacgttacacagctttaacgtcattgacaccgcaaccctacaaaccaccgtatacggccaacaaacacggtgtagaggaaaacaacggcgtcaccgaaattttaggcgtgaggccagggaacgtcgaaaaaaaaaaaaaataaaagtagtgaaaaacacgatggactgaaccttgtcatccgttccccgccccctttcgtgcttttgtaagtattttatacgtaatacgttagattcgagcacactcgcaacgatttataaaatacgtgtacataacacggtgtgtgttagcgtgttttatgcggtttgtagacacacgcctaccggcataacacatcaaatactaaaacaaaaaagggacttaaataagtattagtaattatatagcgggcgacgatgtttccgtttatagctttaatcgtctaaggacgtacagcttttttaaggtgcgaagcggcttctgtttaccgacctcggcccgccgattctcagcttttaggctttattatttttgtaattccggtattatttatgtcaaaatttagtgtacacggcaaattgtgtaactcggctcgcaaacgaaaggtaaaaattacgcggaaggcaacctgacgcgtatttaaagttgaatttaacgcgcgcgtccggttttttggtctccgactggggaaaaggggaaaacaaagctcattctcattagcgggtggcgggtgaattgcgggacccaccgtcgatagagagagagagtcgaacagggcagagcgaaggcggaggtttttcttagaacggttaatcgtacacacacgcaacctaaatcaccggctatgcggaccaaattaaactaaacgggttctgaaattaaagccgtaaagctttgataatttaatacaggttttacagcaacgagaaactagacggacggtttacagaaaccccagggtctggatataaggggcttctacagaagtatatgcgtgaaattccacgtatatagaaataatggcgagctggtaagcggaagaaacaagaccgggccagagtaaatgccggaaaattactcttaatacactgaaattaaatacagagttaaaacgcgtataattttagaaataaaacgcgagactctaacaaacaaagtcttaaagtttgacgagttactaaagcgaaaaaactagtaatatatattaaacaataccgagttaagttgaatttctttatattttattgtacggaatctcagaagttttaagaataattcataatcaagtgatgtatcaaccaaaaatcagagttcttttgatataaaaaaatcttgtacataataaactattgatatataaagatcattacatatatctgtaatggaaatatagtatatataggacagttttaagatattgttaagaaatataaagatagagcacaacctgaaatcgataaaggggaagttaataaagacattaacagggtcatttactattttaagcttcgctgttttatattaacaacgaccattactgacgtcgaaactttgataaatttaccggcccggttcacggactacgcctgtataacaggacggttgtcttatttatagcacggtaggacgaccttttttgctaggacaaggtttaccttactgaaggtgacggggcctattccagagtatttgtgtcttttttacacccgaatccataatcaaacaaacttttcttctttttacttatgtaagtttatatttattttttaaattttacataaataaataaatttcaaaattaaaacataattttgtttatatatcttcattttttttatttcttctaaacatataaaaattttagattacagtgataatacataacttacaaaaaagttgttagtaatgaatataattaagtatgttcaattcgtaaccaggatcgtaacactgtctgtttacgcggaggagaaaaaaaggcacacactctgggtaggaagcaggaaaacgacagtgtgcgtgtgtatgtcacggcaaacctttaggtgtcgctcatgtcgtctgaattatagatttcgttaaatgtcaatacttttattctctgtgtaggcgttttgctgttcgtgtcacgccgtggcgtgccgttgtcggtgtcgttgtcgttgttttggttgtcgttgttcctcggcgcgtttcctgcttcctgctacctcccgctctttgaagacgattgctt

SEQ ID NO: 341 - protein, 70 aa, Drosophila melanogaster
MANRKSEELKLANRQQWGVGTVESKQTHPQNDKHSAAPHGNSHSNSNKTNSNKEPRKGRRTMEGEKLLLT

SEQ ID NO: 342 - DNA, 2095 bp, Drosophila melanogaster
cacaattacccattactagtcttcttcttcttctagtatagtatactacgttgacagtcccccctttcaaattttcaaactcccgagagcggttgcgcggtgtcgagacagcggctcctgaatccatccgaatccgaaagcgaatcgcatccagccaagatatcctatcgtgcagctgaaacccgaaacccgaatccgagttcgaaacgaaacgaatcgcagtggtggtttctctctcgctctctagctctccctctctctcgcgtgtgtgtatgtgtgcgagtggcaggaaaagtgcgaacgcgaaatctttttagctgaaagaaagcgcaacttcaattagcgaaaagcaagagtagctaacaaaaagaaaagcggatcgaaaagtaaagaaaaacaaaaaaaaaaaaacaaaagcaacaaatcgaaatggcaagcgaagtggcccaaatacccgccgaggaaacgcccgcagtggcggcggcggaaaaatcagaggagccggaaaagtcagcggccccgccagcggactcagcggccgctccagctgccgcccccgcagtggagaaggctgaggatgccgatggcgagaagaaggacggcgaggccggaaagcaggacaagcagcaggatggcgaggagcccaaaaaggacgaggcggtggcagcacccgtggcgaccaaatcggaagccccgcccgcccagaaattcaatgtgcacaagaccaacttcgagaaggacatcatctatctgtaccagttctcgcgcaccccactgctgccctccctgtcgccctactgcctgaaggtggagacctggctgcgtcttgtgggcctgaaatacgagaatgtcgatcataagatgcgtttccgctccaagaagggtcagctgccgttcatcgagctgaatggggaggaaatcgccgattcggccatcatcatcaaggaactgtcgtccaaatacgagaagtacctggactcgggactcaccgccgagcagaggaatgtctcgtacgccacgattgccatgctggagaaccatctcatctggatcatcttctactggcgcgccaagtatccggacaatgtgctcaagggctacaaggtcaacttgcagcacgccctcggcctgcggctgcccaactcgattctgaacttcttctttaagatcacctttggtcgcaagtggttccagggcttgaagaagctgaaggcgcacggcatcggtgtccacagcgccgaggagatcgaggagttcggcaaggacgacctgaaggtgctcagcgagatgctcgactgcaagcctttcttcttcggcgacgagcccaccaccctggatgtggtggccttcgctgtcctctcgcagctccactatctgtccaaggacattgcgtatccgctgcgcgactacatgaccgagaagtgccccaacttgattggccacgtttctcgcatgaaggacaagtgcttccccgactgggacgagatctgcacgaagctggacctcaatgcgcacattcccaagccagagcccgagaccaaggagggcaaggagggtggcgagcaggagaaatcaaacgaacaggagggcactgagggcgacaagatcgagaaggagttggagaaggacaagtcaaacgagaaggagtcgaccgaggagaacaaagagaaggaggaaacaaagtaaattcgccgttagttatatgcgtacatatatctagtatatgtgtatgatcgaaggaaacagaaacacccacatacacacacattatatatatatacatatgtagtacgatactatatagtaaggccctatatagctaggcgctagcgctctcatatataagcattcagacatcagacattcaaaccactcgaaaaacaaaaacgaaaaaaaacatcaagaacacccatttacaaacctaggacaactgtaaagcaaaagcaggcaaaaaccatcagcaagagaacgatccactaagtaatgagaaaaaaacaaaaagcatatacaataacgtaacgtaaaactttggacatctttttttatatatttacatgacgacgtttgtattacaagaacaagaaacaaaaagcaa

SEQ ID NO: 343 - protein, 365 aa, Drosophila melanogaster
MASEVAQIPAEETPAVAAAEKSEEPEKSAAPPADSAAAPAAAPAVEKAEDADGEKKDGEAGKQDKQQDGEEPKKDEAVAAPVATKSEAPPAQKFNVHKTNFEKDIIYLYQFSRTPLLPSLSPYCLKVETWLRLVGLKYENVDHKMRFRSKKGQLPFIELNGEEIADSAIIIKELSSKYEKYLDSGLTAEQRNVSYATIAMLENHLIWIIFYWRAKYPDNVLKGYKVNLQHALGLRLPNSILNFFFKITFGRKWFQGLKKLKAHGIGVHSAEEIEEFGKDDLKVLSEMLDCKPFFFGDEPTTLDVVAFAVLSQLHYLSKDIAYPLRDYMTEKCPNLIGHVSRMKDKCFPDWDEICTKLDLNAHIPK

SEQ ID NO: 344 - DNA, 2315 bp, Drosophila melanogaster
atgggagctgctttgggcatctgttcagccgctcaggtaagaaaattgcgagctaattagccaggtaaaattctttacattggctacaaatcaataaaagcagacatatgtttcaaatgcggagaaattcaacattttattaatttcacaatactcatgaatgctgctatgattttcatctaaaagaaagatttagcttgcaatttgagctattagatactttaatgaatttttaaatttttaataagttgaaaacaatatgaaaaatgtattgcaaacttaactttcgatggttgatcattcaattaatccggattattgacaaaacttattagcaagttggatcaaatagaataattcttcaattgcgtctccatttaatacttaattcttgcatttccagtgcgccatgtgctgtggaggcactgcagccagcatgtgctgctccgcctgcccgagctgcaccaacgcctcctcatcgcgcttcatgtacgccttcatcctcctggtgggcaccgtactgggggcgattgcgctgtcccctggactgcaggacaccctgaagaagatgcccttctgcatcaactccacctcgtcgtatagctcgggagcactcagcgctgtctcgggaggatctctgcaagtcgactgcgagtatgcacttggttacatggcagtatatagggtttgctttggcatggcctgctttttcgctctgatgtcactgattatgctgggtgtgaagagctccagggatccgcgttcgcacatccagaacaacttttggccactgaaatttctgatctgctttggcgctgcgattggagccatctttattccggatggatcctttggtccggccatgatgtgggtgggtctaattggtggcctggccttcatactcgtccagctggtcatcattgtggatttcgctcactcgctggctgaaaactggataggtgagtcatgttccggcccatctcccaaatgattcaactcgctaattatcgaattctttcaacagaaagcgccgaaaacagtcgtggatactactatgccctcgctggggtcactcttttgtgctatatcttatcgctgactggaattaccttgctttatatctacttcaccaccgtgagtgtcgtttctatggcttatttactttgtaattagcattgtttttatatttgtagagtactggctgcggcatcaacaagttcttcatctccatcaatctcatattctgtctggcgattagcgtcatttcgattctgccagctgtgcaggaacgcttgccccattctggcctactgcagagctccctggttaccttgtacacggtgtatctaacctggtcggcagtggccaacaatcctggtaggaaaatgaatccagaaccctatatgtgtatatctcatttggttgttttgaatcaacagagaaagaatgcaatccaggcatgtttggcatgatggagggattcggcaatgcaaccaccacggcagcaccgcccacccacaccaccagggtcaccttcgatacgaccaacatcatcggactggtcgtctggttgctgtgcatcctgtacaattgcattagctcggcggtggaggtatccaagatctcgcacgataatagcgagaagcgtggtaagtgttctgtttccattcgccgtgctccgttcgcattcccagcgattaccacatttccacagtttgcatcacgcattcattcgatcgctttgccctcacttttcattttcctcgctgtacaaaaaagaaaaacccaagctaatactggttattaacactcgtttgctattgccgctttgtttattctttattttcttttccgactaacccaactaatccccacttggttatttggtactcgaaactgtgtgaaaaatatggccaactggcgttcctcttgcactctgattaatgtagttttaacagaagctctatcagacacagaggcgggcacggatggcagcggaaagccgagcaccgacaccgagaccgaaggcgtcacctactcctggtccatgttccacttggtcttcgtctgcgcctcgctctatgtcatgatgaccctgaccaactggtacaagtgagtagcaacagcacttatcgtgctaggaaaatataatcccagcaattttttattcccacagacctcattcggaaatcgagctgttcaacggcaacgaggcttccatgtgggtcaagatcgtctccagttggctgggtgtcttcatctatggctggagccttgcagcgcccattgttcttaccaatcgcgactttagctaa

SEQ ID NO: 345 - protein, 462 aa, Drosophila melanogaster
MGAALGICSAAQCAMCCGGTAASMCCSACPSCTNASSSRFMYAFILLVGTVLGAIALSPGLQDTLKKMPFCINSTSSYSSGALSAVSGGSLQVDCEYALGYMAVYRVCFGMACFFALMSLIMLGVKSSRDPRSHIQNNFWPLKFLICFGAAIGAIFIPDGSFGPAMMWVGLIGGLAFILVQLVIIVDFAHSLAENWIESAENSRGYYYALAGVTLLCYILSLTGITLLYIYFTTSTGCGINKFFISINLIFCLAISVISILPAVQERLPHSGLLQSSLVTLYTVYLTWSAVANNPEKECNPGMFGMMEGFGNATTTAAPPTHTTRVTFDTTNIIGLVVWLLCILYNCISSAVEVSKISHDNSEKREALSDTEAGTDGSGKPSTDTETEGVTYSWSMFHLVFVCASLYVMMTLTNWYKPHSEIELFNGNEASMWVKIVSSWLGVFIYGWSLAAPIVLTNRDFS

SEQ ID NO: 346 - DNA, 6046 bp, Drosophila melanogaster
atgctaattgtattcaacataccttgtagacttgatcggctgttcattctactggagacgggctctacagcggccactcgtcaggcggccgccaagcagattggtgaggttcaaaagctttatccacacgagctgcacgctctgctgaacagattggtgggctacctgcacagtacatcctgggagacacggatagctgcagcccagaccgttgaggccatattaaagcaagtaccgccctggcagcccgaattccaggtgctgcccaagaaggagcgttgcgctactaatactgccacagctgcagcggcagcagaagaggacagttgccagtcaagtggttccaactcgacaacggccagcgagcgactacttagctttgatgagttcgatctgcagcaaatcctccacaaaggtgccagactcatcggctccgagggcaacgagtttgatgtgcaggaggagcaaccggctagtggaggcggggaggaggacagaagcctagccagtcgtctaagccgccagcgtgcggtgctgaacgacaaactgggtctgacaacggccgccaaactgggcgttaatcttaccgatatgataacagacgaggatgtggcactcaacaggagtggcagcacttacaatgtcaacgcagaaaagcttccagttgagcacttactcaacataaagacagcggcgaacggatctggtcaagctccacttagttgccgtgagatgaacagggccaagcgcaaggctcgtcaaaatacaagcggatgttctgtcactgcagttacgccaacttgcagccggaggaactccaacagcaatcacagtactggcagcaatcacagcagtaatggcaccactggtgctgcaatagaagaacccgaaaagaagaaacttaagtcaacggatcggcaggaaatcttctatagtttaaatggtgggtggtcgatataaagcgttgattacattttatcaatttcaatttttcatatatatttcagctgctgtgccagatgctacaggcacttgggtggatgccgtctcctggccactggagaacttctgctcacgtctcttcattgatctctttcacgccaaatgggaggtgcgccatggggcggcaacagctctaagggaactgattaatcagcacgctcaaggagcgggaaaggcagtgctacagactcgcgaacagatggatgaagcacatagccgatggctagaggatgctgccctgcgcctgctctgtgtgctttgtctggatcggtttggtgactttgtctcggatcaggttgtggcaccggttcgcgagacctgcgcccaagtgctgggtacgttggtcaaggagatggaggcgtccaaggttcaacgaatcgtgaacattctgcttcagctcatccagcacaagaacgagtgggatgtgcggcatggtggactactaggcctgaagtatgtgtttgtggtgcgtgaggagctgctgcccatctatttgccccagtcaatttcaaacattctcatcggcctgctggacgctgtggatgatgtcggagcggtggctgccgcaaccctgattccagtttcttcctggctgccgaagctattaaatccggcgcaagtatcttccatcgtaaaaatgttgtgggacctactattggatcaagatgaactcacgtctgcctgcaacagtttcatggggctgttagcggccattctatgcctaccaaacgctgctcgttgggtagagatggagccgatggccattttggtaccgcgcctgtggccttttctttcccatagcactagttcggtacgaagatcaacgctgaagacgcttatgaccctgacgagtgcggatagggtcaaatccgagcccaaagacgaaaatcaagttaaagaggaagcggataaggaagaaatgaaacttaactttggagtcagcgactggaagtgggaattgctgcagcaggccctgcgtcacatatatcaacgcatcctagtggagccgcaggcggatatccaggcattagcccgtcaggtgtggtccaatcttatccagcatgcagatttgggtgcgttgttgcatgctgcctgtccattcgtgtcgtcctggatatgcctttcaatgcagccacctagattggcttttgatgcaggggtcctgatcagagctggtggagatgtaagcacgccaggaagcacctcccgaaaacgaacgccccgcataggagacgaattgggcggtaacattctagcgcaatcaaacgcctcattgaaattataccttggtggtagcgaagccacgcctttggatgtccgggatgccaattttatgcgagcccggatttcctcatctcgggcactgggtgcactttctcattacctggttcagccagcaccgggagtggtgtataccccacaaacggagagtcccacagactgttatacaaaagtactattgggtcatttaaatgcccactctgctgtccagcgaatcgtctgcgggctgatcattgcgttttgggcgctagaagacgagccagttcgcccaggaccgcccaatctgcaggaaaagttacaccaatgtgtgagcgagtacgtctactacgatgaggtagccatctcactgacccgactactacaagaggcacaagactttattgctacgctgaagcagaacaaaatcccgattaacgatttcaataatgccaagatccttactctagatcaaatcgaggcagtggcaactacgctaagcgaaaatctgcgttcttatcccctcaagccgaaagttttagatatgctagaggagcgtcgacgcagccttcaggcctcctaccagcagacaaccagtgagcaaagcgcctatcatgtcagtgctcaggcagcactcgctggcgccatctgcgctcttcactgcctgccagataagctgaatccggtggtcaagccattaatggagtccatcaagcgggagcagtgcctccagctgcagcagctgtctgccgagttcctggtccaccttatggatcaggtctgtgatagaaatcctagtccaaatagcaagattttaaacaacctttgtacgctgttaaggagcgatcccgaattcactcccaaactggtaagttggagttagcttgtttataacgcaattttcttatttgttcataaaatctcttttaggtaatgccactagaaaccctcaaacagacgccagtttcgtctgaggttattaataattgtgtttactatggtatcctaacactggcacttcaacagacagtgacaaccactaacacgcgaagcggtgcgggcggtgcaacaactcccactgctactacggcccccaggggccctgggcgaccgcccactggcgaaatattgtccgcaaccaacgccactgctcacattgagcttaaggcgcagcaagccaaggaggcggaggcgaagcaatgccgcatacagcgcctgggagcggcatgtgccattgaaaagctgtgtaggatatttggagagcaaatcattgaaaaggtggctgttttccaacatctgatgtttggcaaggtggagcagttcgtaaaagaagcgtacgactggcgattgggcagccttcttccagatctgggagtgtgcaatgagcttgtcagctctatgcagcttattgagacagcagccccccatctgcatgttgcactgcatcctcagatgtttgcccttctgccctcccttggctttatcgtttgccatcctcttaaggcagtccgacacatggccgctcgttgcatcgccgtgctggccgagatcgatgcttgccagactatgcagtttgtggttcacgatctgttaccgctgcttgggaagattgagcaacttatagagcgacaaggagccatagaggctatcgaacgcgtggtcagcaggctgcagataaaagtggtgccctacatcgtgctgctggtggtgcctctactgggcgcaatgagcgatccggatgagtcagtgcgattgctttccacgcactgctttgcaaatctagtccagttaatgcctctggacggaaagacggagcaattaaaaagcgatccgctgcaggcgcgcaaaacgcgtgaccgtgagtttctcgactatcttttcaatccaaagagcattcccaattataaggttccggtaccaataagtgtggagctgcgctgctatcaacaagccggcatcaactggctgtggttcctgaacaaatacaatctacacggcattctttgcgacgatatggggttgggcaaaactctgcaaaccatatgcatccttgccggagaccacatgcaccgtcagacagccaatttggcgaatctgcctagtctcgtcatttgcccaccaactttaaccggtcattgggtgtacgaggtggagaaattccttgaccagggatccgttctgcgtcccttacactactacggattcccagtgggaagagagaagctaaggagtgatatcggaacaaagtgtaacctggttgtggcatcgtacgacactgtgcgcaaggacatcgacttcttcagcggaatacactttaactattgcgttttggatgaaggccatattattaagaacggaaagacaaagagctctaaggcaataaagcgattaaaggcaaaccatagactgatcctctccggcactcccatccagaacaatgtgctcgagttgtggtccttgtttgactttttaatgcccggcttccttggcactgagaagcagttcgtgcaacgcttttcacgtcccattctgtcatctcgggatgcaaagagctctgccaaggagcaggaagctggagtgctggccatggaggcgctgcatagacaagttctgcccttcctgctgcgccgtgttaaggaggatgtgctgaaggacctaccgccaaagatcacccaggacttactttgcgaactgagtccgctccagcttcgactgtatgaagattttagcaataaacacctgaaagactgtttagacaaactgggcgactcgtcgtcggcatccatggtgacggagaatctcagcgccaagacacacattttccaagcgcttcgatacctgcagaacgtatgcaaccatcccaagctggtgttgcgtcagtctgaggagctcacgaaggtgaccagtcagttggcgttgtcaaacagctcattggacgacattgagcactctgcaaagctgcccgccttgaagtaagtgcactctcgttacacagttaaaatataaagtatatatttaaaatatttcattttccttgccaggcaacttctcctagactgcggcattggtgtgcagacggagtcggtgagccagcatcgtgccctaatcttctgccagctgaaggcgatgctggacattgtggaacaggatctattgcgccgccatctgcccagcgtcacatatctgcggctggacggcagtgtacccgcctcacagcgacaggatatagtcaataacttcaacagcgatcccagcatcgatgtcctgctcctgaccactatggtaagcataaaatgggcttttatgttttatgatccaacttcaatcgtaaatcaatttttaggttggcggcctgggtctaaatctaacaggcgccgatacggtcatctttgtcgagcacgactggaatccaatgaaggatctgcaggctatggaccgcgcccaccgaatcggccaaaagaaagtagtaaatgtttaccggctgatcacacgcaactcgctggaggaaaagatcatggggctgcaaaagtttaagatactcaccgccaacactgtggtgagtgcggagaacgcttcgctgcagacaatgggcacctcacagatctttgacctcttcaacggagggaaagacaagggagcagaatctggatcatcagcggtgcaaggaacagcatcgggcggcatgtccatgaacaccattatcgagaacttgccggaactctggtccgagcatcagtacgaggaagagtacgacttgggcaactttgtgcaggcactgaaaaagtag

SEQ ID NO: 347 - protein, 1929 aa, Drosophila melanogaster
MLIVFNIPCRLDRLFILLETGSTAATRQAAAKQIGEVQKLYPHELHALLNRLVGYLHSTSWETRIAAAQTVEAILKQVPPWQPEFQVLPKKERCATNTATAAAAAEEDSCQSSGSNSTTASERLLSFDEFDLQQILHKGARLIGSEGNEFDVQEEQPASGGGEEDRSLASRLSRQRAVLNDKLGLTTAAKLGVNLTDMITDEDVALNRSGSTYNVNAEKLPVEHLLNIKTAANGSGQAPLSCREMNRAKRKARQNTSGCSVTAVTPTCSRRNSNSNHSTGSNHSSNGTTGAAIEEPEKKKLKSTDRQEIFYSLNAAVPDATGTWVDAVSWPLENFCSRLFIDLFHAKWEVRHGAATALRELINQHAQGAGKAVLQTREQMDEAHSRWLEDAALRLLCVLCLDRFGDFVSDQVVAPVRETCAQVLGTLVKEMEASKVQRIVNILLQLIQHKNEWDVRHGGLLGLKYVFVVREELLPIYLPQSISNILIGLLDAVDDVGAVAAATLIPVSSWLPKLLNPAQVSSIVKMLWDLLLDQDELTSACNSFMGLLAAILCLPNAARWVEMEPMAILVPRLWPFLSHSTSSVRRSTLKTLMTLTSADRVKSEPKDENQVKEEADKEEMKLNFGVSDWKWELLQQALRHIYQRILVEPQADIQALARQVWSNLIQHADLGALLHAACPFVSSWICLSMQPPRLAFDAGVLIRAGGDVSTPGSTSRKRTPRIGDELGGNILAQSNASLKLYLGGSEATPLDVRDANFMRARISSSRALGALSHYLVQPAPGVVYTPQTESPTDCYTKVLLGHLNAHSAVQRIVCGLIIAFWALEDEPVRPGPPNLQEKLHQCVSEYVYYDEVAISLTRLLQEAQDFIATLKQNKIPINDFNNAKILTLDQIEAVATTLSENLRSYPLKPKVLDMLEERRRSLQASYQQTTSEQSAYHVSAQAALAGAICALHCLPDKLNPVVKPLMESIKREQCLQLQQLSAEFLVHLMDQVCDRNPSPNSKILNNLCTLLRSDPEFTPKLVMPLETLKQTPVSSEVINNCVYYGILTLALQQTVTTTNTRSGAGGATTPTATTAPRGPGRPPTGEILSATNATAHIELKAQQAKEAEAKQCRIQRLGAACAIEKLCRIFGEQIIEKVAVFQHLMFGKVEQFVKEAYDWRLGSLLPDLGVCNELVSSMQLIETAAPHLHVALHPQMFALLPSLGFIVCHPLKAVRHMAARCIAVLAEIDACQTMQFVVHDLLPLLGKIEQLIERQGAIEAIERVVSRLQIKVVPYIVLLVVPLLGAMSDPDESVRLLSTHCFANLVQLMPLDGKTEQLKSDPLQARKTRDREFLDYLFNPKSIPNYKVPVPISVELRCYQQAGINWLWFLNKYNLHGILCDDMGLGKTLQTICILAGDHMHRQTANLANLPSLVICPPTLTGHWVYEVEKFLDQGSVLRPLHYYGFPVGREKLRSDIGTKCNLVVASYDTVRKDIDFFSGIHFNYCVLDEGHIIKNGKTKSSKAIKRLKANHRLILSGTPIQNNVLELWSLFDFLMPGFLGTEKQFVQRFSRPILSSRDAKSSAKEQEAGVLAMEALHRQVLPFLLRRVKEDVLKDLPPKITQDLLCELSPLQLRLYEDFSNKHLKDCLDKLGDSSSASMVTENLSAKTHIFQALRYLQNVCNHPKLVLRQSEELTKVTSQLALSNSSLDDIEHSAKLPALKQLLLDCGIGVQTESVSQHRALIFCQLKAMLDIVEQDLLRRHLPSVTYLRLDGSVPASQRQDIVNNFNSDPSIDVLLLTTMVGGLGLNLTGADTVIFVEHDWNPMKDLQAMDRAHRIGQKKVVNVYRLITRNSLEEKIMGLQKFKILTANTVVSAENASLQTMGTSQIFDLFNGGKDKGAESGSSAVQGTASGGMSMNTIIENLPELWSEHQYEEEYDLGNFVQALKK

SEQ ID NO: 348 - DNA, 3891 bp, Drosophila melanogaster
atgaacacactgggtcctaagaaggacggaagtccgaatatagactttttccagtcgccggagacgctgcagggctttgaatcgattcgccagtggctgcagaagaactgcaagaagtatttggcccacagttcggagcccatcacgaaggagtccttggcccaattgctcattcacttcctgcagtatgtggaagccaagctgggcaagaactcagcggatccgccggcaaccagaattccgatgcgttgctttctggacttcaagagcggcggtggtctgtgcatcattttctcgaccatgttccgtttccgggccgagcaacgcggcaagaagttcgacttctccattggcaagaatcccacgcgcaaggatcccaacatccagctgctgatcgagattgagcaggcgttggtcgaggcggacttgtatcgcataccgtacatctatattcggccggagattgaaaagggcttcgagggaaaactgcgcgagatcctggacaatcgacgggtagagattgtgtcggacgaggaggacgccacccatatcgtctatcctgtggtggacccacatcccgacgagtatgcgcggcccattttcaagcgcggcggacatgtgatgctgcattggtactacttccccgagtcctacgattcttgggctgtgaataactttgacctgcccgatcacattccggagaatcccgagtcaccggcggaacgttggcgtgtgtctgcatcctggatcgtggacctggagcagtacaatgagtggatggccgaggaggactacgaggttgacgaacagggcaagaagaagacgcacaaacagcgtatgtccatagacgacatcatgtcattcggcgacgagaagaagaagcctgctgccagctcgggcggaggcaagcagaagagacgccgttcaccatctcccgccagttcggcatccacctcaaagccgggcaagcgtaagcgttctcccgccgtggtgcacaaaaagtcgcgcaacgacgatgatgacgaggacttaactcgcgatctggatgatccgccggccgagcccaatgttcaggaggttcataaggcaaatgccgccttgcagtccaccgccagtccagctccgggcggtaaatctcgtggcgacaacgacatgatgcccattaaaggtggcactatgaccgatctggatgacgaaatgactggaggaagcgccgctcaagccatgtctaccggagatggggaaaactcgcagacaggcaagacaagtgataacagcaacacgcaggaattctcttcatcggccaaagaggatatggaggacaatgtgaccgagcagacgcaccacattatcgtgccttcgtactcggcttggtttgattacaactccattcatgtgatcgagaaacgggccatgccggaattctttaacagcaagaataagtcaaagacaccagaaatctatatggcctacaggaattttatgattgatacgtacaggctcaatccgacggagtatttgaccagcacagcttgtaggcgtaatcttgccggagatgtgtgcgccataatgcgagtacacgccttcttggagcaatggggcctgattaactaccagatcgatgcggatgtccgccccacccctatgggtccaccaccaacctcacactttcacattctttcggatacgccatcaggtctacagtccataaatccgcaaaagacgcaacagccgtcggcggcaaagacgctgttggatctggacaaaaagccattgggtaaagatggcggcctggagttgggcgataaaagtggtctgactggcatcaagacagaggctctagagaatggcgctgccggaggattaagttccggagtgagccagtttggactcaagctggatcagtacgcaaagaagccggcggccatgaggaatcgaacggcggcaagcatggctcgtgaatggaccgatcaggagactctgctgttgcttgagggcttggaaatgcacaaggacgactggaacaaggtctgcgagcacgttggatctcgcactcaagacgagtgcattctgcatttccttcgacttcccatcgaggacccgtatctagaggatgatggtggcttcctgggccccttggcctgccaacccattccgttcagcaagagtggcaatcccattatgtccaccgtcgcattcctggcatctgtggtcgatcctcgcgttgccgctgcagcagcaaaggctgccatggaggaatttgcagccattaaggatgaggtgcccgctacaataatggacaaccacctgaaaaacgtggagaaggcttcggcaggtggtaaatttaatccgaactttgggctggccaatagtggaatcgcaggaaccggaaacgacaaggacgatgaagagggcaaggagggtggcgcatctgcatccgctggcggctctgatgaggaaatgaaggacctaagcaaaaaagacgacgatgccaagtccaaagacaatacaaaatcggataagaccaacacaaacacagactcgagttccacatcatcatcagcgacaggcaacaccaacaacactgacaagaaaccaaaggagtcgtccggctcctcgccttcgggcgataagtcagccatcaagtcagacaaatcaaacaaatcctcacccacagaaaccgcagcagccgcaagtggtggcgaagtggacatcaagacggaggacagcagtggcgatggcgaaactaaggacggcactgaggccaaagagggaacgggaaccggaacagggccattggcggtgccaaaggaaggaacatttagcgaaaataacatgcagactgcggcggcggcagctttggcatcggcagcagttaaagccaaacacctggctgccctggaggagcgtaagatcaaatccctggtggctctccttgttgagactcagatgaagaagctggagatcaaattgcgccactttgaggaactggaggccaccatggagcgagagcgcgagggattggagtaccagcgtcagcagctgatcacagagcgtcagcaattccacctggagcagctaaaggcagccgagttccgagcgcgccaacaagcacatcatcgtcttcagcaagagctccaaggccaggcggccgcgggatcaatgatcttgccgcagcaacagcagctaccacaggcccagcagccgcagcagcaacagcaaacgctgccacctcatccgcacctggcgcagcagcaacagctgcctccgcatccgcaccagttgccgccgcagtcccaaccgctagcgggtcccaccgcccagcaccagccgttgcccccgcacgtagtgtcgtcgcccaacggtgctccctttgcagcgccaccgatttcgctcacgggaggactcccgccgggcgcacccacggccattgtcacgaatccgagcgaccaaaccggaccagtcgcagcgggagcagcgcaatctcaagcacctacacccatggatactacaccaccaagcagcggtccagtgtcagatgccaacgcaccgccgggatcggcaatgccaccagggggaattcctccggcgaacactgctcccatcgccggcgtagctccctcttcttaactcttactcataagccaggaaacgttaaagtaaatagctctaagtcgtacgctctcagtatgtattatgtatactccactttaagcccaactcttgtgtgtaatctgaaggagatgcactacacattgacgcgtctccagttttgtgtaagtttcatttcgtgtccggtcgcgtttacaagcaattgcacaaatattttgaaccaagtttcaaagccgaaaaataggcattcaataaaaatttatttaaactaaaaaaaaa

SEQ ID NO: 349 - protein, 1209 aa, Drosophila melanogaster
MNTLGPKKDGSPNIDFFQSPETLQGFESIRQWLQKNCKKYLAHSSEPITKESLAQLLIHFLQYVEAKLGKNSADPPATRIPMRCFLDFKSGGGLCIIFSTMFRFRAEQRGKKFDFSIGKNPTRKDPNIQLLIEIEQALVEADLYRIPYIYIRPEIEKGFEGKLREILDNRRVEIVSDEEDATHIVYPVVDPHPDEYARPIFKRGGHVMLHWYYFPESYDSWAVNNFDLPDHIPENPESPAERWRVSASWIVDLEQYNEWMAEEDYEVDEQGKKKTHKQRMSIDDIMSFGDEKKKPAASSGGGKQKRRRSPSPASSASTSKPGKRKRSPAVVHKKSRNDDDDEDLTRDLDDPPAEPNVQEVHKANAALQSTASPAPGGKSRGDNDMMPIKGGTMTDLDDEMTGGSAAQAMSTGDGENSQTGKTSDNSNTQEFSSSAKEDMEDNVTEQTHHIIVPSYSAWFDYNSIHVIEKRAMPEFFNSKNKSKTPEIYMAYRNFMIDTYRLNPTEYLTSTACRRNLAGDVCAIMRVHAFLEQWGLINYQIDADVRPTPMGPPPTSHFHILSDTPSGLQSINPQKTQQPSAAKTLLDLDKKPLGKDGGLELGDKSGLTGIKTEALENGAAGGLSSGVSQFGLKLDQYAKKPAAMRNRTAASMAREWTDQETLLLLEGLEMHKDDWNKVCEHVGSRTQDECILHFLRLPIEDPYLEDDGGFLGPLACQPIPFSKSGNPIMSTVAFLASVVDPRVAAAAAKAAMEEFAAIKDEVPATIMDNHLKNVEKASAGGKFNPNFGLANSGIAGTGNDKDDEEGKEGGASASAGGSDEEMKDLSKKDDDAKSKDNTKSDKTNTNTDSSSTSSSATGNTNNTDKKPKESSGSSPSGDKSAIKSDKSNKSSPTETAAAASGGEVDIKTEDSSGDGETKDGTEAKEGTGTGTGPLAVPKEGTFSENNMQTAAAAALASAAVKAKHLAALEERKIKSLVALLVETQMKKLEIKLRHFEELEATMEREREGLEYQRQQLITERQQFHLEQLKAAEFRARQQAHHRLQQELQGQAAAGSMILPQQQQLPQAQQPQQQQQTLPPHPHLAQQQQLPPHPHQLPPQSQPLAGPTAQHQPLPPHVVSSPNGAPFAAPPISLTGGLPPGAPTAIVTNPSDQTGPVAAGAAQSQAPTPMDTTPPSSGPVSDANAPPGSAMPPGGIPPANTAPIAGVAPSS

SEQ ID NO: 350 - DNA, 873 bp, Drosophila melanogaster
atgtccgctacgccacgccagaagcagttcgacatgaatcgtagccgggccaataacttggacagcagcagaagcgggtctgccaacaacaaaaacaccacggacagcacgaaaaatgtggtttccccgcaacacaatcaacgcaagctgcaagcctccatggagcgcctacaggtgcaacaggtgaacacaagtcgccgggcagccggctccaactggatggccgctgctggcggtggagcagcagcagcagctggaagtgaaaaccaggatgccaaggcgacggagtcagcaccactaagcaaatcggcacgcatgcgcatgaaaaagaaggcacaccgcaatcgcattttggccatggactgcgagatggtgggcgtgggacacaacacacgggacgacatgctggcacgcgtgtccatcgtgaatcgcatgggacacgtgctgctggacaagtatgtgaagccgcgaaaggaggtcaccgactaccgcaccagcgtgtccggcattcggccgcaggacatcgctaacggtgaggactttgccgccgtgcaaaacgaagtggtgaagctgatacatggccgcattctggtgggacacggcctgcgcaacgatcttgccgtactgggcatccgccatccgttccatgacattcgtgatacgtcgcattataagccgctgtgcaaactcatctctaatacccacacgcccagcttaaaacgcctgacaaaggccgttctgggtcaggagatccaaacgggcgagcataattccgtggaggatgcacgtgccgccatgggtatctacaatcgcgttgccgtcgactgggagaagtatctggagaagacgcggcatcaacagcagcactattag

SEQ ID NO: 351 - protein, 290 aa, Drosophila melanogaster
MSATPRQKQFDMNRSRANNLDSSRSGSANNKNTTDSTKNVVSPQHNQRKLQASMERLQVQQVNTSRRAAGSNWMAAAGGGAAAAAGSENQDAKATESAPLSKSARMRMKKKAHRNRILAMDCEMVGVGHNTRDDMLARVSIVNRMGHVLLDKYVKPRKEVTDYRTSVSGIRPQDIANGEDFAAVQNEVVKLIHGRILVGHGLRNDLAVLGIRHPFHDIRDTSHYKPLCKLISNTHTPSLKRLTKAVLGQEIQTGEHNSVEDARAAMGIYNRVAVDWEKYLEKTRHQQQHY

SEQ ID NO: 352 - DNA, 179 bp, Drosophila melanogaster
taccagcagctccttcattttgaaatgaacttttcgccccgcaccggggatagacgtaagccggggaagccgccggacccgttgaaagggttagtgtagctcctaataagtaaactccttacggcaaacgtcgtaatgtaccgagttgtcctcctagcggagtgataaatactcaacgt

SEQ ID NO: 353 - protein, 59 aa, Drosophila melanogaster
MVVEEVKLYLKSGAWPLSAFGPFGGLGNFPNHIEDYSFEECRLQHYMAQQEDRLTIYEL

SEQ ID NO: 354 - DNA, 1770 bp, Drosophila melanogaster
atgctcagtgcgcaacaagagatcgatcgaggaagacgccctgcaaacaaagaacatcaatttacagcaccgccaccaagactcaggcgcagctccaccaagatgacatcacggacgcgccactgtgcccgactggggatcgttctccttgggatctgttgcatcgccagcggaatttacctcttccgcaactggatcgatatgtttacacgcatgcgcggccaggaaatggccctgagccccaattcacgatcattcgagggctggaaggtgtcgccgctgcctttagacttcgatatatatctatttaactggaccaatccagatgacttttatgtgggatcgaacaagaagccacactttgagcaactgggaccctatcggtttcgagagaaacccgataaggtggacatcgaatggcacaatcataacgcctccgtatcatttcacaaaaagtcctggttctactttgatgctgccggcagcaacggaagtttatgggataaagtgactacggtcaacagcgtagcgcactctgctgctagacgtgcggccgtcgactggtttgccagaactggcgttaacattgccaataaattatatagacagggagtggccattacgaaaacagttgatgaaatgcttttcaagggctacgagcatccattcataagcgtgggcaagctgttgagacctcaggatgttccctacaaacgtataggctaccattacccacgaaatggcagttccgagttcgatggtgatatcaacatgtttacaggagctgatgatatcgctaaaatgggtcagattcatacgtggaataatttgacgcatactggagcctttgagggcacctgcgggcaggtgcacggctcgatgggcgaattctttccgcccaaccttggcaccaaagacaccgtctacatgtacatgcccaagatgtgtcgtgctataccattggactacgtggaaactgtgaccgtgcatggcgtgaccgcctacaaattcagtggcacccggcacgctgtggacaatggcactctgtatccggatacccgttgctattgcgtcggaggaaagtgtatgcccagcggtgtgatcaatatcggaccctgctcctttaacgcatccgtctacatgtcctttccgcacttttacatggcggatccaagctatctggaggccatcgagggtttgcgaccagaacgcgagaagcacgagttcttcatggccctggagcccaatgcgggcgtgccaatggacgtgggtggtggctttcaggccaactactacatggagccaattccgggtattaccttgtatgagaatgtcccgacggtcatgatacccatgatgtggtgcgaggagcgcgtacgcgtgtcagaggaaattgccgcagacatcgcgctcgttccgctaattgtcctgctggggcagatagtaaccggcatccttttggcaggcggtcttatatgcacctgctggtacccgacgcgacaagtgacgcacttttgtcacagcgatccaaaggcgaaggccagtgtcctgcgaccactgaacgcctttggtgtaaattcgtcggcagccacagcgccggtggcccaactattccggaacaacattagttcatcgggcaacgagcgtgtgggagtgcgcctactggattataatcgcgattctggcataagacaggagagtggtaccatggaaagctcgcacagggagcgtctgatcagcgaggactcgcccgatgttgtagttagataa

SEQ ID NO: 355 - protein, 589 aa, Drosophila melanogaster
MLSAQQEIDRGRRPANKEHQFTAPPPRLRRSSTKMTSRTRHCARLGIVLLGICCIASGIYLFRNWIDMFTRMRGQEMALSPNSRSFEGWKVSPLPLDFDIYLFNWTNPDDFYVGSNKKPHFEQLGPYRFREKPDKVDIEWHNHNASVSFHKKSWFYFDAAGSNGSLWDKVTTVNSVAHSAARRAAVDWFARTGVNIANKLYRQGVAITKTVDEMLFKGYEHPFISVGKLLRPQDVPYKRIGYHYPRNGSSEFDGDINMFTGADDIAKMGQIHTWNNLTHTGAFEGTCGQVHGSMGEFFPPNLGTKDTVYMYMPKMCRAIPLDYVETVTVHGVTAYKFSGTRHAVDNGTLYPDTRCYCVGGKCMPSGVINIGPCSFNASVYMSFPHFYMADPSYLEAIEGLRPEREKHEFFMALEPNAGVPMDVGGGFQANYYMEPIPGITLYENVPTVMIPMMWCEERVRVSEEIAADIALVPLIVLLGQIVTGILLAGGLICTCWYPTRQVTHFCHSDPKAKASVLRPLNAFGVNSSAATAPVAQLFRNNISSSGNERVGVRLLDYNRDSGIRQESGTMESSHRERLISEDSPDVVVR

SEQ ID NO: 356 - DNA, 8495 bp, Drosophila melanogaster
  misc_feature (1)..(8495): n = a, t, c, or g
tctagatttttaattccagagatctctgcggacagacagacggaaaaatagacgaacggacggactgatgagaacttatgaactcggctagtggttccgattaagaatataaaggggtcagatacgctaccttcgctcgtcacaaatttctcagcggtactagggtttcaacgagtataactacgaggtataactatattacataagactggtggagttccaaactcacggctttagcataggtggaatgctgcacgtgccattaaaggtgttcttagtccactttggttttagatcctgcgcttgatcgctgtcgtccgagtcaggatccttcgtggactccgattttgaagagcccggcctttgtttgtgctctctgcgatggatttccagctgaacgtgttcgataaataccgctgagcactggctgcaggagagcggaccgtcactgtcgtgggtgcgcaggtgccttttaaggtgatctttacgcatgaaagccttcgagcagtggaaacacttgtgcgctggcttgcttaggtggtttcgcaaatgccgcttgaggttcgatttttgcatataagtgcgtgggcagtagggacacctgttgcacagatcggtgatgtgggtccttaactgggtctgggaacaaaatcgcttagaacagtgcgggcagttgtagtagccatcggcatcgcagatcattttggtacttctgaaaatcgggaatataattatttaagcttatttaagttatttttaattattcatataaaagtataagtaatcaaagatgtaccttcaaatttttataatttttcaattatttgtctatcttgangcttgatatttataacaaattgcattaccttgtagcttcctttgggatcatgtctgcctgttcttctgtgcgacaagtccgcttacgaggatgcagggtgaaggactccggtgggccatcaatatttccctcttggagcttcgcttggagtgtttgtttttgactaagatcatcatcttctggtttctgcgtttttgtcatttgctgcgtatcctgttgacgatcgcttttgagctgcattttctggtttattatctggttcttatccccattacatgcagctaagtgcacttggttttccggagcacccgactggtttaggacgcggaagaagtgctggtagctctgctcgctttgccacttgaaccggaaagcattctgcacggccaggacgcaggaaacgcatatgaactgcggcagcaggtcgccgcgtttcactggacgttcggtacacctggccaggatgtgcgagaggctcatctccggttcgtcgagcacaggatcccttacattggcgaatatatctaccagggtgccggtctcgtccatacaagtccggcacacgttcttcgcgctgtgcatcatctaaatcaacaaccaaatgcaatgttttttaataaaagaacagtttacgacatcttatgaattgaccattgacattggccttgttttgcaaactaataatcccgtttcgctggttttacagttattgctggtaaattatatgaataaacggcacattttttaaagagtgcaattgatttctcattctacacaagtgtaagtgttcactttttggagaattggatgataactggaactgcaaagaaaccaaccgtcgcactgatcatttgtacattttttttagtgctgaataatacatgtacacatggaaaacaattattcagaataaaaaaaattgagattgatatgatatgaaaaaatatgtatatatgtatatatatgtatatatgtatgtatatttgtattaataacacaaatatttttcaggcaagctggctttcattgtaatttaattacgatttggtgttctatttattttgggaatagagtactagtatttacacaaaacatctgatgattcatttatgaaataaaaattcaatattttcaatagaagctctacaaagcaaataaaagcttttgatgaaaatatgtttaacccgccgctaaaattttaaaatcaatccaattacattaattctgcattacaatataaacccaagctttattgattaaaaccatactgtgcgtaatatatacatttcagtttcttacaatttaaatatctagtaaaaaaaattcgctaattgacagtactatataactgaaacaggttggcagcccgaaggcaacagctgattcgctttatgaatgcggaaaatttgtctgtgtgtttatgaatattatgccgatcaatggaacgaggaatagttatgtgagtggctacgcggcaatcacaacatacgtactctgtagaaaaccccgcttgactccttgccagactcgataaattggcccgcagcgctttgcggttgcacagaataccgcaaatcaaccgcccattggcccctgatattcatttcaagcgccagcacagcagatctgggtcagattgcaaggaaatctgggaaatgctgagccaactgcctctgttcgctgggggcgagattgttcggggcttcggacgcggctccaaagagctgggcatcccaacaggttggtggcgacgttaggcgaattgcgaaggtcatttctaattgataaccaaaccacttgttagctaactttccgctggaggtggtgaaatcgctgccggaatccctgcccactggcgcgtactacggttgggcaaacgtggataatggacccgtgcacaagatggtcctcagcatcggctggaatcccttctacaacaacaaggagaagagcgtggagacgcacatgctacacgactttaactgtgacctttacggccagacactcaagatatgcattgtaggctacctgcgaccggagcgcagtttcgactccctggagtcactgattgccgccatccgcggggacatcgagcaggccaaggcgttcctcgacgaggcggacaaggccaagctgaaggaggctccgttctttacggagaagctctgctcgtcgaaatagcgatggcgtaggtcagtctggaaaaggaggctttgctgaaggacgcactactactcttcgcacggctttgaaatagttattccatcagttatcttatctctcaatttgcgcgatgtgcaaagcggaattcgaatatcgaatcaagtacttaagctaaacgttttcattaaattcctactgctcataatgacaccaacaaattgaaccaatcgcatttcagtttgatacttatcaaatgtataaaagaaaccgtttttgtaaaaatgttcctactgtgaattttttctaatatatttatctcttagtggcgtttttattgagggattgcagtgaacttattttcaattgttatacatatgtagttaattattatttatttatttcacgaaacattttttatatttttggttttaattgcctacgtgttaaaaaaaaaactgttaaatattatatatacgaacatacacatacaatttttaattaattttaaatgcgcaaaataactttaattcaatttaaaataagctttagtttgatttagtttgattgcgtatattttatataaacgaataaaatcaaattataatgtgtatattgttttgtgtactaaattacaaattaggtaaaattccaatttgaaaatacagactatagaatgctatcgatccatcagcacaccgcactatcgatatcagcgaccgatcgatattgggcttgatctcgaccgattcgggaaaaactgagctgcgcgtgcgagcgtgcgaggatttttcttgtataaaaccgttgcgtaaatcagcaggtaaatcagatcggcgtcaactgcgccactgcctgcaatcagttgccttcaaccagcatattgtaccgatttttcagcagcaacatgtcagcgccacagcaacaacaacagtcgcagcagaagcaacaacaacatgtgcgcgtggtcgagcaacaacaggtggaaccagctgaggcggtgacctccagcatggaatcggaatccatctcggccagcaaggagctaaccggtttgacgcacgagtgcggcgttttcggggcaatcgcttgcggagattggcccacccaaatggacattgcacacgtgatctgtttggggctggtggcactgcagcatcgtgggcaggagtctgcgggcatagcgaccagcgagggaaagtgctccaagaacttcaacgtgcacaagggcatgggtatgatcagcaccctgttcaacgacgactccatgaagaagcttcgtggcaacctgggcatcggtcatacacgctactcgaccgctggcggatccggagtggttaactgtcagccctttgtggtacatacgacccatggagcattggccctggcccacaatggtgagcttgttaacaacgaatctctaagaagggaggttttggccagaggcgtgggcttatccagccacagcgacagtgagttgatcgcccagtcgttgtgctgcgccccggaggatgtttccgaactggatggacccaactggccagctaggatcaggcatttcatgatgctggcgccactctcctactcgctggtcatcatgctaaaggacaaaatctacgccgtgagggacacctatggaaatagaccgctatgcattggcaagatagtgcccatcaatgctgggcacggaaataacttagacacacctgccgatggttgggtggtgtccagtgagagctgtggcttcctgtcgatcggtgccagatacgtccgcgaagtggagcctggagagatagtggagctgtcgcgaagtggctaccgcacggtggacattgtggaaagacccgactttaagcgcatggccttttgtatatttgagtacgtttacttcgcccgcggagacagcatcttcgagggtcagatggtgtacacagtgaggctgcagtgcggccggcagctgtggcgagaggctccagtggaggcggatattgtgagttccgttcccgagtctggcacagcggcggcgcatggctatgcccgtgagtctggcattgaatttgccgaggttctctgcaggaatcgctacgtgggacggacgtttattcaaccctctacacggctgcggcagttgggagtagccaagaagttcggagccctatccgagaacgtggctggcaagagattggtcctgatagacgattccattgtgcgcggcaacaccattggaccaataatcaagctgctacgggatgcaggcgcccgggaggtgcacatccgcattgccagcccaccgctgcagtacccatgctatatgggtataaatattccaactcgagaggaattgattgccaacaagctgaaccccgaccaactagctaggcatgtgggcgccgacagtctggcttatcttagtgtggagggactagtggaggctgtccaactaaagcaccgcgatgcaggcgatagtaaatccaagggaacgggccactgcaccgcctgtctcactggtgaatatcccggtgggctgcccgatgagttgagctggtgataccgattgaagctcataagtgccaaaagacgaaaaaggcttttggaaaccagttttgcacgcaattgcccactacgaaataacaaaaattgcagtataaatagccatagagggctcggaattactgtcacaaattttgcatttagtttatctagcattacagcccacccattcctatttacactctaccttattagatcttaagtaagcagcccacgtgcttccccaagctaaaagacaccgatttatgtctggttttgcctctggaactttactcatagtacaaaatacataactctttgttgcccatcttgaatatcactaaaatttgttgtttgcaaatgccaataataaagacacttagactattgattaaacagactctattttctctctctagctatcgaagatatgaaattacgtgcatgatatcgagcagtatgctccaaggtccgaagccagttgctctgtgcggcaatgcaccatttcctaaggaggtcatgggttccacaagcactggaggcattcggatatgattcttttgaattttagatgattaattggtgataagtccactgcaataaatacttaaaaacagattcaattgtcgtgctctgttgctttgcaaataatcattcttatcaatactgaggaaacactttaattttacacaaataatgagttgaccaatgatatggcaaaatttcttgtctaaggtttactttaacaacagaaaccggcgttgaagtcgtaaatagtttgaagtaacatccgaatatgtatgtacatagtttttattataacttatgctagtccaccatttgtattatatctgtatcttaagagtccagcatatctcgaagtccttcagctccaattccctttcaataacctgtgtgtagagattatcaagcgtttcctgcattcgttgtttgagtgtggcattctgaatggaagcaatttccgttgacttttgcacctgctgcgctttcagttcacgaatctggcgcgtcagttgattgatcttctgctggacctgttgctgcgtgtactgcggctgcggttcgtctatgaattccatgttctcgaactcctcgcgcttggctagcatttggctatcgtagaagccactgggagcagcaaggttggagcttgatccggcggcactgagcttaggactgctggcttcatgcccaaacatagacttgctgaacacgttctgctccattttcactccgcccgctccagtattactgccactagcgccaaagaagtccgacattcgtgaatcatcagccgagagtcgtgaggattcctccatcacccgccgctgcatggtgttattgccccgatcgggctcatcctcgtcatccgtgctggacacttcctcgccgaagatgtcgtggacagcaactcccatgttcggcgcccggtgtgagggaaagttgctggcttcgtcatcatcggactccacttggaggtgccgctgggagctcatttccatgatcgtcttttcgctggcatgcatggtgctttcgtcctgcaaatcgtcatccgcatcgttgtagggtttgatgtccgattgctccagttcatccattggcttgtcctcttcgtttatgatttcatagtcaactctgacagcctcgttgtcaatgcgcagcagatgtttcacttccttctcaatctcgggagcttcgacattctttttcttcagagttttgcggaatcgtcgttttctcacattcttgcacggcggtgtgatgccgtgcggaaagaggtattttttgtccaccttgttggggtccttctttttgttcttgttgggcgactccttttccgtctcgtcctcccgctcctccttgcaaatgagtatctggcagatgtctgccgacttgtagaagctcttgttgtcaatggtcttgtagctctcgacgacggtgggcaaatccacgagtttcgtgtacagtatctgatcatctattcgcacttcaccgtacctcagatccggatccagttggatggtcagccggtccttaatggtgccagcatttattgcctcatggaccgtgtccgccagttcctgcggagaatccgtcaatttgcacggcttgttgtgatgtttgtttgtgctatgtatggcttaccttcggcacgcgcatgataaactggctctccagctctacgccatcatcccgggccttgtgctccgcttgcttaaccttgtcgctcttcttttcaaacatttcaatgcgatttttccagaaaaatacaacttcttttgaagacactaaatgctcattagagatgggagttagatggggcaccgctagtgatggcattcacgtcacagttatcgcggcgagcacgacgaatatttaaaatggttcacactgcagccgcatctgcagaaatataagccctgtataccgcaaaatggcaaggcattttattttttaatctttttaccaacaaatttaatcataaaggtgaagaccgaatgggtttgccgtacgttgaaaggggatgagccgcactgctttgaatatcggatgtgagtccgctgaactatcgataaggcaatcgtcagccaaccctgctccaatttcgtcttctcatcccttttgccatgacggaaaacacgaattgatgtggatttctactaatttataacataaaaatacgtcaaaagttgaacaatcagagatcgagctagtcgaaggtcagcaagcaaggcagacgacatgcaggagaagtggttactggccgcactttcgctggcgctcctattgggcacctgctcggcgctctacgaagaccagatcaaaaagttcgactggtgagtgtggtacgatatctgaccattgacccggcgctaatacggcggatatgtgcggcttttgcaggcgaggcgtcaatgtgggagcactgaagcagtctcgcgtcgac

SEQ ID NO: 357 - protein, 546 aa, Drosophila melanogaster
MSAPQQQQQSQQKQQQHVRVVEQQQVEPAEAVTSSMESESISASKELTGLTHECGVFGAIACGDWPTQMDIAHVICLGLVALQHRGQESAGIATSEGKCSKNFNVHKGMGMISTLFNDDSMKKLRGNLGIGHTRYSTAGGSGVVNCQPFEVHTTHGALALAHNGELVNNESLRREVLARGVGLSTHSDSELIAQSLCCAPEDVSELDGPNWPARIRHFMMLAPLSYSLVIMLKDKIYAVRDTYGNRPLCIGKIVPINAGHGNNLDTPADGWVVSSESCGFLSIGARYVREVEPGEIVELSRSGYRTVDIVERPDFKRMAFCIFEYVYFARGDSIFEGQMVYTVRLQCGRQLWREAPVEADIVSSVPESGTAAAHGYARESGIEFAEVLCRNRYVGRTFIQPSTRLRQLGVAKKFGALSENVAGKRLVLIDDSIVRGNTIGPIIKLLRDAGAREVHIRIASPPLQYPCYMGINIPTREELIANKLNPDQLARHVGADSLAYLSVEGLVEAVQLKHRDAGDSKSKGTGHCTACLTGEYPGGLPDELSW

SEQ ID NO: 358 - DNA, 2255 bp, Drosophila melanogaster
taccccgccgcgttcctgtttggcgcccactaagggcttgtcctacgcgcgtagacagcgcggtagacggacacggtcgactggtaccacgacaggacgcacaggtagcagatggattcgcaccggtagatgagcgggagggatttcacccatggatgaaatatcggggggagattttgggtattgggtgagtattgaaccataacaaagatcccggaagttcaggccgaagctcgacctagggcagtacacggtctgccacctagcggtctacgggttgttgacggggacccgtaggacgccgctcaccacggactggttctggtcaccgaaaacgggggtctaggtgagttatcacgcagcgttgccgtggctataggtcgacttgttgacgtggtctcagtggttgtgtagcacgcggtaccattcaaatatcgtaaagggaatccactttccaaggattcgttgttgaccaattgaaaacactggttgacatcgtgacggaatttgactcgtttgatcatcttctgcagtagcagaacccgtaggacgatatccttttcaagacggtactgagtaagaaacgaaaaccacctttctgctacttcgcacagttcataaacggggaggtaaaattatcggtgaaccgcggtgctctcaaattgctagttgtttactggtaataggaagaaaacaagagaggggtgtctaactggactcagccgacttgttcaagttaacgttgttgccgtggcggacgttgttatagtctccgcagaagttgacgaggttaccattcaaggtatgacctctgggggatacacttaaaagttaatgactaacgaaaagtggaacgtcctgtgacgttcttatacagcctcaagaagaacacagtggtgtttcggctacctgaatgccagttaagcgtcttcctattgtggttcgacttacctaagaagctcacagtgccccacgtgacgtggttctagttcttcgggaagtcgacgctagcgatgacaaggttctattgttgatggttacacttgtgggaataatacgtgcattcgacctttattcctatttttattgatatattttaccttcattttaggtattatgaaaatcctcctattagaataacggcggctaacactcttgcgtcaccgaaagttggttcgggctcctaggctcgtgccacacgcatagcttgggaaactcaaaacctttctcctactaccgttggacgactggttgacgcggtgtcagtgttctctcagcctgttagcgtagtgcattcagattttcgtagctttttctaaaacggatgttagacaataaggttttcacggtgcctgacgtatttaccttgggaggaccttgtactgtggaacgggcgagggaagtacttgaagtgggtcaaaacccggtagatactcttgtcgtggtccagccacctagggctcgtctccatggacgggttggtccggttggactggtagatgtcgaccttctttgacaagtagttggacctcccgacgcacttgtgtgacgcacccctcacgttcctgaaacaccgagcgataccgttgctaccgctattgttgtggcgggtcagtgcgatggtcacgatgatattgttccaaacaccccctaatttgaggtaaacttaaggtcaagaccatagtcaaatggactgcaaagataatggagagtgtcctgagcttacacctcaaacaccaacgtgcgatgctaaacctgttccaaatgtccctcgaagatcagagcgactaacacgggtaacacgagaaacactagagtagatatagcaatacatagtagtggtttaggcagttccacccaccgaatgaagctcttctttagtctacttaactagaatgatatattatgaagatagaaaaaaagtccacccactgctacggttctacgcgacacaaacacggccgctactaagtctattactaccggggaaaccgggtcctgatcgtttgttcgtcgtcctagtctacatgctatgtctgctgctacatcaactggacctcgtggttcgccacctaccagttcttgatagcctggtgcctgaaggcgacctgttggttctcgattagccatcgtggttcagcaactatggttagtcagggcagcctcttaggccttgatcactagtttagaaactggtcctagtcctctttcgttgatgcacgctacaagggctctttggtgatcagtatgatatt

SEQ ID NO: 359 - protein, 524 aa, Drosophila melanogaster
MGRRKDKPRVIPEQDARICRAICLCQLTMVLSCVSIVYLSVAIYSPSLKAFKSGFELDPVMCQTVDRQMPNNCPWASCGEWCLTKTSGFCPQIHSIVRRNGTDIQLNNCTRVTNTSCAMIDLSRLNKFNCNNGTACNNIRGVFNCSNGHCKNMSEFFLCHHKADGLTVNSQKDNTKLNGFFECHGVHCTKIKKPFSCDRYCSKITTTNVNTLIMHEDNLIAADCENAVAFNQARGSEHGVRIEPFEFWKEDDGNLLTNCATVTRESDNRITATDCINGTLLEHDTLPAPFMNFTQFWAIYENSTRSVDPEQRYLPNQANLTIYSWKKLFINLEGCVNTLRGECKDFVARYGNDGDNNTAQSRYQCYYNKDSNVEFVVARYDLDKVYRELLVSLIVPIVLFVISSISLCIITKSVKVGDDAKMRCVCAGDDSDNDGPFGPGLANKQQDQMYDTDDDVVDLEHQAVDGQELSDHGLPLDNQELIGSTKSLIPISPVGESGTSDQIFDQDQEKATTCDVPEKPLVIL

SEQ ID NO: 360 - DNA, 781 bp, Drosophila melanogaster
ccaacgagggaaatgatccaatagccgctcgcctctccaaatgctattggaatctttcgtctccattcttgaaggatgtcattccaaaaaagcgtccgtccaaagcattcaatcgcaagccgccgaccaaactggaatccgaggaggaggagtaccacaaattcgagcgtggtctccacatttctgacttaggccccaagttaaaggagacggatggacagccaaagcttaagttcgagctggcagacgactacaagagctccaaacactgcatctgcatgcgctcaaacaccgcatacgagtgcgaacgatgccatcagtacttctatggtcgcctcgcccagatttgtgatctgcatccaaatgtatgtggtcctcttaagggacaacacctaaggatatcccctttgagggattttatgtaatatgccaccaagatagatatagctagtaacaccaattggtggttgccccataggaccgagttatacaaaagattagcgaagggaactgtatttaatagtacatatttataatacgcgtatatatagatatgcgctgttatttcttcgatcaggcatctccctacccatatcaaattctttattgtattgtaaaatcttatcttttttctcttccttgctaggagtttttccttatggactttcgcaattgtccattctgtaaggcacccattgagatgattaagaagtcacctatcagctgggagacaatacgtaagattgaagaagccgaattgcccagtgatggggatctatga

SEQ ID NO: 361 - protein, 165 aa, Drosophila melanogaster
NEGNDPIAARLSKCYWNLSSPFLKDVIPKKRPSKAFNRKPPTKLESEEEEYHKFERGLHISDLGPKLKETDGQPKLKFELADDYKSSKHCICMRSNTAYECERCHQYFYGRLAQICDLHPNEFFLMDFRNCPFCKAPIEMIKKSPISWETIRKIEEAELPSDGDL

What is claimed is:

1. A method for identifying a compound that inhibits the activity of a protein essential for Drosophila larval viability, comprising:
(a) expressing in a recombinant host a DNA molecule comprising
(i) a nucleotide sequence selected from the group consisting of the even numbered SEQ ID NOs:14-360, or
(ii) a nucleotide sequence encoding an amino acid sequence selected from the group consisting of the odd numbered SEQ ID NOs:15-361,
to produce a protein essential for Drosophila larval viability;
(b) testing compounds suspected of having the ability to inhibit the activity of the protein expressed in (a); and
(c) identifying a compound tested in (b) that inhibits the activity of the protein.

2. A method for killing or inhibiting the growth or viability of an insect, comprising applying to the insect a compound identified according to the method of claim 1.

3. A method for identifying a compound that interacts with a protein essential for Drosophila larval viability, comprising:
(a) expressing in a recombinant host a DNA molecule comprising
(i) a nucleotide sequence selected from the group consisting of the even numbered SEQ ID NOs:14-360, or
(ii) a nucleotide sequence encoding an amino acid sequence selected from the group consisting of the odd numbered SEQ ID NOs:15-361,
to produce a protein essential for Drosophila larval viability;
(b) testing compounds suspected of having the ability to interact with the protein expressed in (a); and
(c) identifying a compound tested in (b) that interacts with the protein.

4. A method for killing or inhibiting the growth or viability of an insect, comprising applying to the insect a compound identified according to the method of claim 3.

5. A method of identifying a compound having insecticidal activity, said method comprising:
a) combining a polypeptide comprising an amino acid sequence selected from the group consisting of the odd numbered SEQ ID NOs:15-361, and said compound under conditions conducive for the binding of said polypeptide to said compound;
b) selecting said compound identified in step (a) that binds to said polypeptide;
c) applying said compound selected in step (b) to an insect to test for insecticidal activity; and
d) selecting said compound identified in step (c) that has insecticidal activity.
